United States Patent Application Publication US 2026/0274907 A1, published September 17, 2026 (application 19/473,083).

The application's sequence listing, which the Patent Office published only in electronic form, follows.

SEQUENCE LISTING (80 sequences)

SEQ ID NO: 1 - DNA, 18936 bp, synthetic construct
  source 1..18936: mol_type = other DNA
atgtcggtgaccccggggccagggatgccctctgcatctttattagtaaatcttctttcagctttattcatgccctttgtgtttggagacacagaagtaagatttgctggacaaacagaatttgttgttaatgaaacaagtacaacagttattcgtcttgtcatcgaaaggataggagagccagcaaatgtcgttgcaattgtatcgctgtatggcgaagacaccagggacttctttgacacatatgctgcagcttttatacctgctggagaaacaaataggacagtgtacatagcagtatgtgatgatgacttgccagagcctgatgaaacttttatttttcacttaacattacagaacccctcagcaaaggtgaaacttggatggccaaggaccgttactataacaatattatcaaatgacaatgcctttgggattatttcatttaatatgctctcctcaatcacagtgagtgagcccaggggcagaaatgagtctgtgcctcttactctaattagggaaaaaggaacatacgggacagtcactgtgtgttttgaggtagaaggtggcccaaatccacctgaagaagatttgagtccagttaaagggaatatcacctttccccctggcagagcaaccataatttataacttgacagtacttgatgatgagatacctgaaaatgacgaaatgtttttgattcagctgaaaagtgtagaaggaggagcagagatcaacacctctatgagctcagttgagatcatcattaagaaaaatgatagtcctgtgaggtttacccagagtgtttttttggtacctgaggaagatcatatactcataattccagtacttcgtggaaaggatgatagtggaaatctgattggatctgatgaatatgaagtttcaatcagttatgccgttataactgggaattcaacagcacatgcccagcaaaatgtagacttcattgatcttcagctaaacacaactattgtttttccaccttttgttcatgaatcacacctgaaatttcaaatcattgacgatgccataccagagattgctgaatcctttcatgttgtgttactaaaggattccttatggggagatgctgtgctattaggcccttctattgtacaagtcaccattaagccaaatgacaagccttacggggtcctctcattcaacagtatcttgtttgaaaggatggttataattgatgaagatacagtctcaagatttgaagaaatcacagtggtcagaaatggtggtacccatggtaatgtttctgtgaactgggtgttgacacggaataacagtgatgcctcaccagtaacagcagatatcagaccgagttctggagttcttcattttgcccaagggcagatggtggcatcaattccttttactgtcgtgaatgacgatctcccagaagaggcagaagcttatctacttcagattcagcctcgcacaatacgtggaggtgcagaagtgagcgaaccggcagagcttttgttctacattcaggatagtgatgatgtttatggcctgataacattttttcctatggaaaaccagaagattgaaagtagcccaggtgaacgatttttatctttgagctttttaagacaaggtggaactaaaggagatgtgaggatgctttactctgcactttatattcctgctggacctgtggacactttgagagcaaaagatggcatcttaaatatatctaggagaaatagccttacattcccagagcaaaaaactcaagtcactacaaaattaccaataagaaatgacgcatttcttcagaatggggcccacttcctagtacagttggaaaatgtggaattggtgaacataattcccccaatcccacctataagccctagatttggaaaaatccgaaatatttctttactggttactccagacattgcaaatggggaaattggctttattagtaaccgtccaatcattctgcatgaaccagaagattctcctgctgaagtgatacacattcctttacatcgggatggaacagatgggcaggctactgtctattggagtttgaagccctctggctttaattcagaagcagtgaccctggatgatataggcccctttaatggctctgttgtgtttttatctgggcaaagtgacacaacaatcaacattactgtcaaagctgatgacataccggaaatgaatgaaactataacactttctctagacagggtcaatgtagaaaatcaagtgctgaaatctggatatactagccgggatctaattattttggaaaatgatgaccctggaggagtttttgaattttctcctgcttccagaggaccctatgttataaacgaaggagaatctgtagagcttcacatcatccgatccaggggggctctcgtgaagcagtttctacagtaccgagtagagccaagagatagcaatgagttctatggaaacatgggggtgctagaatttaaagctgcggagagggagatcgtaatcaccttgctaacaagattggatgggataccagagttggatgaacactactgggtggtcctcagcagccatggtgaacgggaaagcaagttgggcagtgctgcggttgtcaacataacagttctgaaaaatgatgatcctcatggggttatagaatttgtttctgatcgtctaattgttgtgataaatgaaagtaaaggagacgatacatacagtgctgtttatgatgtaataagaaatcgaggcaactttggcgatgttagtgtatcgtgggtggttagtccagactttacacaagatgtaattcctgtccaagggactgttttctttggagatcaggaattttcaaaaaatatcaccattttttccctaccagatgagattccggaggaaatggaagaatttaccattaccctacttaatgccactgggggagctaaaataggaaataaaacaactgcaactctgaggattagaagaaatgatgaccccatttattttgcagaacctcgtgtagtgaggattcaggaaggtaggactgctaactttaccattcttagaaatggatctgttgatgttgcctgcgctgtccaatatgccaccatggatgggaaagcaaccgcaagagagggagattttgttcctgttgaaaaagtagaaactcttgtgtttgagattggaagacgagagcagagcatatctgtatttgtcagtgaagatgatatcccagaaacagatgagcccttttacataatcctctttaattcaacaggtgatacagtagtgtatcaatatggaatagctacagtgataattgaagcaaatgatgatccaaatggtgttttttctcttgagcccatagacaaagcagtagaagaagggaagactaatgcattttggattttgaggcatcgaggacactttggcagtgtttctgtggcttggcagctgtttcagaatgattctgctttgcagcctggacaagagttctatgaaacttcaggaactgttaacttcatgggtggggaaggagcaaaaccagtaattctccatgcttttccagataaaattcctgaattcaatgaattttacattctaaaacttgtaaacatatcaggtgggtccccaggtcctgggggccaactagcagaaaccaacctccaggtgacagtaatgattccattcaatgatgacccctttggagttttcatcttggatccagagtgtttagagagggaagtggccgaagatgtcctctcagaagatgatatgtcttacattactaacttcactattttgaggcaacaaggtgcctttggtgatgtacgagtaggctgggaaatactatccagtgagttcgtggctgggttgcctccactgttagattttttactggttggaatttttcccagcactgtgcatttacaacctcacatgcggcgccaccatagtggaacagatgctttgtacttcagtggactagagggtgcgtttgggattgttaatcccaaataccatccctccaggaacaacacaattgccaactttacattttcagcctgggtaatgcctaatgccaataccaatggatttattatcgcaaaggatgatggtcagggaagcatctactatggggtaaaaatccaaacaaatgaatcccatgtaacacttgcccttcattacaaaaccttgggttccaatgttacatatattgccaagacaacagccatgaaatatttagaagaaaatgtttggcttcaccttctgattatcttggatgatggcatacttgaattctaccttgatggaaatgcaatgcccaaaggaattaagagtttgaaaggagaagccattatggatggtgctgggattctgagaatcggggcaggggtgaatggcaatgacagatttacaggtttgatgcaggatgtgaggtcttttgagcggaaactgacccttgaagaaatttatgaactttataccatgcctgcaaagagcgatttacaccccatttctggatatatggagttcagacaaggagaaactaacaaatcattcattgtttctgcaagagatgacaatgaagaggaaggagaagaattattcaatcttaaactagtctctgtgtatggaggagctcgcatttctgaagaaaatactacagcaagattaataatacaaaaaagtgacaatgccaatggcttgtttggtttcacaggaacttgtataccagagattgcagaggaaggctccaccatttcatgtgtggtggagcgaaccagaggggccctggattatgtgcgtgttttttacaccatctcacagatcgaatctgacggcattaattaccttgttgatgactttgctaatgccagtggaactatcacatttcttccttggcagagatcagaggtcctgaatatatatgttcttgatgatgatatccctgagctcaatgagtattttcgtgtgacactggtgtctgcaatttctggagatggaaaacttggttctactcccaccagtggtgcaagcatagatcctgagaaggaaacaacagatatcaccatcaaagctagtgatcatccatatggcttgctgcagttctccacagggctgcctccccagcctgaggacgcaatgaccctgcctgcaagcagcgttccgcacatcactgtgcaggaggaggatggagaaatccggttattggttgtccgtgcgcaaggactcctggggagggttatagcggaatttagaaccgtttcattgacagcaatcagtcctgatgactaccagagtattgctagtaccttagaatttcaacctggagaaagatataaatacatttctgtcaacatcactgataattctatccctgaactggaaaagtcattcaaagtcgagttgttaaactcagaggagagagtggctgaactctttagggttgatggcagtggtagtggtgatggggacatggaattcttccttccaactattcacaaacgtgccagtctaggagtggcttcccaaattctagtaacaatcgcggcctctgacaatgctcatggtgtatttgaatttagcccggagtcactatttgtcaatggaactgaaccagaggatgggtacagcactgttatattaaatgttatgagaagtcatggagctctatctcaggtgattttgcggtggaacatagactctgatcctgatggcgatcttgccctcacctctggcaacatcacgtttgagattgggcagaggagtgccaacatcacagtggaaatattgccagatgaagatccagaactggataaggcattctctgtgtcaatcctcaatgtctccagtggctctttaggagttcacaccaatgccacattaacagttttggctagcgatgatccttatggggtattcattttctccgagaaaaatagacctattgaggttgaggaagcaacccaaaacatcacgttgtcaataataaggttgaaaggtctcatgggaaaagtcatagttatgtatgcaacaatggatgatatggaaaaaacactttattttccacctaatttagctaaagcaactcaaggaagagactatataccagcttctggatttgttatttttagagctaaccagagtgaggcaacaataactatttccattttggatgatgatgaaccagaaagatcagaatctgtgtttattgaactgcttaactccactttagtagagaaagtacagaatcgcccaattccaaattctccgcgccttgggccaaaggcagaaactgttgctcatctaattatcattgccaacgataatgcgtttggaacacttcagctatcagcgccaattgttcgagtggcagaaaatcatgttggacccattgtcaatgtgactagaacaggaggagcatttgcagaggtttctgtgaagtttaaagctgtgccaataactgcaattgctggtgaagattatagtatagcttcatcggatgtggtcttgctagaaggggaaaccagtaaagctgtgccaatatatatcattaatgacatttaccctgagctggaagaatcttttctcgtgcaactgctgaatgaaacaacaggaggagccatactaggggtgttaacagaggcgatcataattattgaggcctctgatgacccctatggattatttggttttcagattactaaatttattgtagaggaacctgagtttaactcagtgaaggtaaacctgccaataattcgaaattctgggacacttggcaatgttactgttcagtgggttgccaccattaatggacagcttgctactggcgacctgcgagttgtctcaggtaatgtgacctttgcccctggggaaaccattcaaaccttgttgttagaggtcctggctgacgacgttccggagattgaagaggttatccaagtgcaactaactgatgcctttggtggaggtactattgggttagatcaagtggctaatgttattattcctgccaatgataatccttacggtacagtagcctttgttcagtcggtttatcgcgttcaagagcctctggaaagaagttcctgtgctaacataactgtcaggcgaagcggagggcacttcggtcggctgctgttgctctacagtacttctgatattgatgtagtagctcttgctgttgaggaaggtcaagatttactgtcctactacgaaccgccaattcagggggtgccagacccacttcagagaacttgggtgaatgtctctgctgtgggggaaccccagtatacctgtgccactttgtgcctcaaagaacatgcttgcctagcattttcatttttcagtgcttctgagggccctcagtgtttttggatgacattatggatcagcccaactggcaacaactcaggcttctggacttacaggaaaaacacaaccagggtagcatctctctttagcagtcaggctgtggctggtagtgactatgagcctgtgactaggcaatgggccacaatgctagaaggcgatgaatttgcaagtctcacggtttctgttcttcctgatgatttcccagaggtggatgagagtttcctgatttcccttcttgaagttcacctaatgaacatcacagctagttttaaaaatcagccaactatagggcagccaaatacttctacagttgtcatagcattaaatggtgatgcctttggagtgtttgtgatctacagtgttagtcccagtacttcagaagacggcttgtatgtcgaagttcaggaacagccacaaaccacagtggacctgatgatccataggacaggaggcagcttaggtcaagtgacagtcgaatggcgtgttgttggtgggacggctactgaaggcttagatttcattggtgctggaggcattctgacttttgctgaaggtgaaaccaaaaaggtaattattttaaccattttggatgactccgagccagaggatgatgagagcatcatagtgagtttggtgtacaccgaaggcggaagtagaatcttgcccagctccgacactgttaaagtgaacattctggccaatgacaatgtggcaggaattgttagctttcaaacagcttccagatctgtcataggtcgtgaaggagaaattttgaagttctatgtgatgagaacaccccctggtcgaggaaatgtcactattaactggaaaattattggacaaaatctagacctcaattttgctaactttactgggcaactcttcttttctgaggggtcgttgaatcaaacaatatttgtgcatttgctggatgacaatgttcctgaggagaaagaagtataccaagtaattctgtatgacgtcaggacacaaggggttccgccagcaggcatggctttgcttgatgctcaaggatatgcagctgtgctcacagtggaagccagcgatgaaccacacggagttttaaattttgctctttcatcaaggttcatattagtagaagaggctaacgtaaccattcagcttttcatcaacagagaatttggatctttaggagttatcaatgtcacatataccacagttcctggaatactgagtctgaaaaaccaaacagaaggaaacctagcagagccagaagtggattttgtaccaatagttggctttctgattttagaagaaggggaaacatcagcagccatcaacattactatacttgaggatgatgcaccagagctagaagaatatttcctggtgaatttaacttgtgttgaacttatcatggctcctttaacttcatttcctcccagactagattcagaaggcttgactgcacaaattattattgatgccaatgatggtgcccaaggcataattgaatggcagcatagcaggtttgaaataaatgaaacccagggaagtttaacattggtagcccagaggagcagaaggtctcttggccacgtttccttgtttgtgtatgcacagaatttggaagcacaactggggctggattatatcttcaccccaatgattcttcattttgctgatggagaaaggtataagaatattgacgtcatgattcttgatgatgacattccagaaggagatgaaaattttcagctgattttaacaaatccttctcctggactagagctgggggcaaatacaacagccttagttactgtatttgctaatgatgatggccctggagttctgtcatttaacaacagtgagcactttttcctaagagaaccaacagccgtctatgtacaagagagtgttgcggtattgtacattgttcgggaacctgcgcaaggactctttggaactgtgacagttcagttcattgtgacagaggtgaattcttcaaccgagtctaaagatctgaccccttccaaaggctatattgttttggaagaaggtattcaattcaaggccctacacatatctgccatattagacacggaaccagaaatggatgagcattttatttgcaccttgtttaaccccactggaggtgctagactaggggcacctgttcaaaccctgataacagttttacaaaatcaggcccctctgggtctgttcagtatctctgcagttgaaaatagagccacctctgtagccatcgaagaagccaacaagactatatatttaaatgtgtcacgtactaatggcattgatttagctgtgagtgtggagtgggagacagtatctgaaacagcctttggcatgaggggaatggatgttgtgttttccatatttcaaagttttctgaatgaatcagtttctgactggtgtttctttactttggaagattcaatatatggtataatgttaagaaaatcgtctatgagattttctactgtttatcgatggcaagggatttttattccagttgaggatctaattatagaaaatcctaaaacctgtgagacctttaatattggtctttccccctactttgtaattactcatgaagaaacaaatcaggaaaggtcttctgttaacagtgtgtacacagtcacatctggattcaaattattactgatacaaacaatcattatttcagaaagttctcaagtaagatattttacttccgacagtcagaattacttaattgttgcaagtcaacaagcggattctgaattgactcaggtctttagatggaatggaagaagcttcgtgttgcatcagaagctccctgtacgaggtgtgctgtgcatggccttgttcaacagaggaggctatgtgttcttagctctttcccaggctaatgccgggctaaatgcccttttattcagatggtctggtgatgagtttattaacttccttgaagtgctggtcagtgggacaacgcaagttgaggctttgacttcaggtggtgacgtttacttaatttttgccaaaaacatctttctaggagctcagaattcaatcgacatttttatctgggagacaggacagtcttctttcagatattttcagtctctgaattttaccgctgttcaccagatccactcctttacaccagcctcaggaatagtccacatacttcttattggccaagatgtgtctgccctttaccgctggaattcagagctgaatcaattctcttttgttctgggagcaccttctgctcatgatgcagcttctgttacagtgaagtcccttaattccagcaagaatttaattgccctggcaggagctacccactcacacatatatgagttggcctacatctccaggcagtctgactttattcccagctcaggtgaactgatgtttgaacctggagatagagaagctataatagcggtaaatatccttgatgatgtagctccagaggaagaagaatccttcagagttcaactgaaaaatcccaaaggaggcgcagagattggtattcgtggctatgtaaaaatatccattgtgtctaatgatgatgcctatggaattgttgcatttgctcagaattcattatataagcaagtagaagaaatggagcgagatagcctagtaaccttgaatgttgagcgcataaaaggaacatatggtcatataaccgtagcatgggaagctgatggaagtattagtgatatatttcctacctcaggcgtgatttcattttccgaaggccaggcactgtctacagtcactctgactattctggctgatgatgtacctgagttatccagggttgtgaccgtaacactcatcagtatcaccacagatggggttgaggacctatcaaaaggtgctactattgatcagaaaaggaacaagtctgtgataactactctacccaatgactcaccctatggcttggtgggctggcatgccgagtctgtctttgttagagtagcagagccaaaagagaacatcactcttcttcagttactaattgttcgagataaaggattatttggggatattgccattcacttgatagctaaaccgaatttcttactgcacatcaataatcaagctactgaaaatgaagattatgtgctccaagaaacaataatgataatgaaagaaaacatgacagaaactcatgccaaagttgctattttgtcggatgatgctccagagttggaggaaggatttattgtcaatatcaccaacctgcacctggtaaactccgacttctctgcaggacagccaattgtgcgcagacctgggatggaaatagctgagataacaatcgaagaaaatgatgatcccagaggaatttttaagtttcatgttaccagagatgctggtggcgttattattgcctatgaggtgcctccacctttgaatgttcttcaaatacctgtggtccggctggctggaagctttggggcaataaatgtttattggaaagcaacactggacagtgctgacctggaagactttaaaccagctcaagggattcttgaattttcaaatggacaagttactgccatgatagaaatcaccgtcatcgatgatgctgaatttgaactcatagagatgttcaatatttccttaatcggggtagctggaggtggcagacttggtgatgatattgtggtaactgtcgttattccacaaaatgattctccatttggagtatttggatttgaagaaaagagtgtaatggttgatgaatcccttttgtctgatgaccctgactcttatgtgacattaacggttgtccggtccccagaaggaaagggagctgtccgacttcagtggaccatagatgagatggctaaagatgatctcagtcctttgaatgggacacttcattttgacgagactgagtcccagaagaccattgtattgcacatacttcaggatactgtgccggagggggacaggcgtttcatcattcagctgctatcagttgatgaggtagaaatatctccagtgagaggaagtgcatcagtaatccttcggggagataagggagtgtcaggagaagttgggatagctccatcatctcggcatgtcctcattggggaaccctcagcaaaatataatggaactgctataatcagccttgttcgtggcccagggattttgggggcagtcaccgtgtactggagaatattccctccttcagagggggaatttgtggaaacatctggaaaactgacaatgcaagatggacagtctgcagccatcgtattgatacaggctttgaatgatgacattcctgaggaaaagcgtttctttgagtttcagctgactgcagccagtgagggaggaatactgagtgaatccagccgaactgcccgtatcacggtggtggccagtgactttccctacggccgattcgccttcttacaggagcagctgcaagtgtcagaagaagcacaaagggttaacatcacggtcacccgctcaggtggatcttttggccttgtgaggctctggtatgagactctgagtgggaccgccgaggcgggcgtggattttacccctgcggcaggggagctcctctttgaaccaagagaggtggcgaaaagcgtatatatcgagatattggacgatgaccttcctgaaggccctgaggaatttactctagcggttacaaaggtggaactccagggaagagggtatgattttaccatccaagaaaatggacttcagatagatcaaccccctgaacttggaaatatctccattgttcaaataataataatgaaaaatgataatgcagaggggatcattgaatttgacccaaggtatactgcctttgaagttgaggaagatgccggggtaatcatgatcccagtggtgagactgcatgggacttacggccttgtgacagccaatttcatctctcagagttcctctgctactcctggcggtgtcgattatgcactgcatggtagcacagttacctttcagcatgggcagaacttaagttttataaatgtctccatcattgatgacaatgaaagtgaatttgaggagccgattgaaattctgctcgctggagctactggtggagcggtccttgggcgccacctagtgagtagaattacgattgccaagagtgacgcgccctttggagttataagatttctcaatcaaagtaaaatttctgttcctaacccaaattccacaatgatcttatccttggtactggagcggactggaggactcttgggagagattcaggtggactgggagatacgaggacccaattcacaggatgtgttaccaccacagaacggtgacattgcagacccagtgagcgggtccttctattttgaagagggagacgggggaataaggaccataattctgacaatctacccttatgaaaaaattgaagttgaagaaactttcattattgaacttaaacttgttaaaggagaagctaaattagactccagagctagagatgttacattaacaatacaaaagtttggtgatccaaatggagtggttcagtttgctcccgagtctctatctgagaagacatattcagagccattggcttccgaagaacccctgctcattactttctttgtcagaagagtaaagggccgtttaggagagattacggtttattgggaattaagtagcgagtttgatattacaggagactttctttccacaaaagggtttttttccattgctgatggagagagtgaagtgagcttcaatgtccatttgctaccagatgacatacctgagatagaggaagattatgtgatccagcttgtttctgttgagggaggggcagagctggatctggaaaaaagcatcacacaattctctgtttctgcaaatggcgacccacatggagtatttgccttgtattctgatcgccaggcaatacttattgggcagaaccttagtagatatatccaaattaatgtcacccggcatgctggaacatttggagatgtgactgttggattccgagtatcttctgaccgtaaggaacagccagttgttactgaaaatgcagagaggcaagtggtagtcaaagatggtgccagatataaagtggacacagtgccaataaagaatcaggtcttcctattactgggctctagtttcacattgcagctggtgactgtgatgctcagtggtggacgtgtctatggaacgccaaaaattctccaggaaggaaagtcagctcttcttcctgtccctgagaaagctgccaattctcaggttggatttgaatctactgcttttcaacttacggatgtggctgctgggaccagccatgttgtggtctctaggagaggcacatatggttctctcacagttgcctggactacgggatatgctcctgggatggaaattcccgaattcattgttgctggcaacatgacccccaaactggggagcctctcattttctcatggtgaacacagtaaaggagttgtgttgcagacatctcctagtcctggtcgaccagaagcctttgtcattcacctctcaggagtgcagagcagtgtaccaggtggagctcagcttcgatctggtttcacggttgctgaaattgaaccaatgggagtctttcagttttcccctagttcaagacaagtcatcatgtcagaggatgtacagatgatcagattacatgtacagagattgtttgggttccacagtgatctgatcaaagttttgtatcaaacaactgcaggaagtgcaaagccactggaagactttgagcctgtccaaaatggggaacttctttttagaaaattccaagccgaggttgattttgaaatagccattattaatgatgagctccctgagatagaagaaattttttatatcaatctaacttcagtagaaattacgggactaaaaaaatttgatgctaattggacaccacgattgaatctagatttcagtgttgcaatgatcacaatattagataatgatggcctggtggaaatggatgtttctttccccaggacaactgtggctgcaacaggtgacacagctctcattcctgtagaaactgactctaccacataccctgacacaactaagataactgccatctcacagccaactgaaatggttgccattgttactgaggcaactggtacatctcccatgcctgagaaacttgtcacccttcctagtacgtctaccacgtccgagaagcctgccatggacacggtaactgccaatgtttctattcatggaacatttagtcttgggccacctattgtttatgttgaagaggagatgaagaatggcacgctcaatattgccgaagttcttatccgaagaactggtgggtctactgggaatgtcagtataacagttaaaacctttggggaaagatgtgctcagaaggaaccagatgcatggccttttcatgatatctatggaatttccaacctaacatgggcaagtgaagaagaagactttcaagaacaaactttgatccttacgtttttagatggagaaagagaaagaaaagtatcagttcaaattttggatgatgacgagcctgaaggacaggaattcttctatgtatttctcacagatcctcaagggggagcacagatcgtgaagggcaaggatgatactggatttgcagcttttgccatggtgattatcacagggagtgatcttcagaatggcatttttggattcagcgaggagtcccagagtggactagatctgggtgaaggagctgataagagaagactaaatcttattgtcagaaggcagcccaacagggcctttgaagacgtcagggtcttttggcgagtctcatttaacaaaaccactgctgtgatccagaaagatggtgtgaacctgactgatgaacttctgtctatatcagggatcacgacctgtgtaatgggtcaaacaaaatgcttcatcactattgagctcaaaccagagaagatacctcaagttgaaatgtatttttttgtggagctctatgaagtaactgctggagctgcaataaacaacagtgccagatttgctcagattaaagtcttacggggcaatgaacctcaaagcctcgtatatttttctgtgggttctcggctggcagtggcttataagaagtccactttaatcagtttgcaggtggccagagattctgggccagcactaatgatatccgttaactacagtacccaggagctgaggagtgctgaaacaatcggccgtactctcatatctccagctatttctgggaaggattttgtgagaactgaaggcacactggtgtttgaacctgggcagagaaacaccgtagtggacatcatcctaaccccagagatggcatctttaaatccatttcctaaacgcttccagattgtgctttttgacccaaaaggtggggccagaattgataaagtatacgggactgccaacatcactctcgtcgctgacttggattctcaggctgtttgggggcttgcagaacagctgcaccagcccctggatagtgacattctcaacagggtgctccacaacattaacatgaaagtggccacggagaacacagatgaacagctcagcgccatcttgcatttaataggcaagataacagttgaaggaaaaaatcaagtgttcagtattgaaagccgaaatctcttctatgaaattctttgtgctcttattaacccaaagcgcagggatactaggggattcagccactttgctgaaatgactgagagttttgccttttctctgttgactgatgttacctgtggctctcctggtgaaaaaagcaaaaccatccttgacagttgtccatatttgtcaatactggccctgtactggtatcctcagcaaatcaatgggcacaagtttgaaggaaaggaaggcgattatattcgaattcctgagaggttattggatgtcccggatgcagaaatgatggctgggaaaagtgcatgcaaattagtccagttcacagagtatagcagtcagcagtggtttacagctgggaataatcttcctgccctgaaaaataaggtattatcactgagcgtgaaaggtcaaagttcacatcccctgactgacaacaatgaggttctctacaggatttatgctgccgaacctagaattgttccccaaacatccctttgtctcctctggaatcaggctgctgcaagctggttgtctgacagtcagttttgcaaggtggttgaggacacttcagactacgtggaatgtgcctgttcacacatgtccgtgtatgctgttttcgcccagactgacaacttgtcttcatacaatgaagcctttttctcttcaggatttatatgtatctcaggtttttccctggccgttctttcccatatcttctgtgccaggtactccatgtttgcagctaaacttctgactcacatgatggtagccagcttaggtacacagattgtgtttctgacatctgcatatgcaagtccccaactggcagatgagagctgctcagccatggctgctgttacacattacttgtatctttgccagtttagctggatgctcattcagtctgtgaacttctggtatgtactggtgatgaacgatgaacacacagagaggcgatacctgctgtttttccttctgagttggggacttccagcttttgtcgtgattctccttatactgatcctaagaggaatctatcatcagagcatgccacagacctatggactcatccacggtgacctgtgtttcatcccaaacatctacgcggctttgttcactgctgctttggttcctttaatgtgccttgtggtggtgtttgtggtattcatccacgcctaccaggtgaagccacagtggaaagcatatgatgacatcttcagaggaagaacaaatgctgcagaaattccactggttttatatctcttcgccctgatttctatgacatggatttggggaggacttcacatggcttacagacacttctggatgttagtcctctttgtcattttcaacagtctgcagggcctttacgtgtttgtggtttatttcattctacacaaccagatgtgctgccccatgaaggccagctacacagtggaaatgaatgggcacccagggcccagcacagccttcttcacacctgggagcggaatgcctcctactggaggggagatcagcaagtccacccagaatcttatcagtgctatggaggaggtaccacctgactgggagagagcatccttccaacaagccagtcaggccagccctgacttaaaggcaagtccacaaaatggctccacattcccttcctcgggaggatatggccaggggtcactgatagccgatgaggaatcccaggagtttgatgacttgatatttgctttaaaaactggtgctgggctcagtgtcagtgataatgaatctggtcaaggcagccaggagggaggcaccttgactgactcccagatcgtagaactcaggagaatacccatcgcggacacccacctctag

SEQ ID NO: 2 - DNA, 377617 bp, synthetic construct
  source 1..377617: mol_type = other DNA
atgtcttcctctgatgaagaaacgctcagtgagcggtcgtgccggagtgagcggtcatgtaggagtgagcggtcttaccggagcgagcggtcagggagcctgtcgccttgtcccccaggagacactctgccctggaacctaccactgcatgaacagaaaaagcggaaaagccaagattccgtgctggaccctgcagagcgtgccgtggtcagagtcgctggtaagagaggcccctgaacagctggatgctgtgggtacgagggaggaatgggccagtgtatactggctggatggtggtggagagtccatctcagagctctctgacaagccagctggcatctaatttgttatcattgctattggaaagatgattaaaaggacgttaaagaaaaatttgaaagaagaaaatctgccatccgtcgcctccttgctctgagaccagttttgttttttttcttccagttttgtatcttctttccagtctttgtccacatgcagttatatttttcaagcagttttcttcatggcttatataccattctggatctgactctttccacttactcttttttaaatttttatctatttatttatttattttatatgctttagatgaaggtttacagaacaaactagcttctcattaaacagtacacatattattttatggcattggttaccaactccatgacatgtcaactctctcccatatctaccttgggttccctattaccagctttcttgtcccctcctgccttcaagtccttcccctagggctggtgtgccccattagtctcattttgttttatgagcttgtctaatctttggctgaagggtgaatgccaggagtgacttcattactgagctaaaagggtgtctgggggccatactgtcagggtttctgcagtctctgtcaggccagtaagtctggatttttttgtgagttagaattttgttctacatttttctccagctctgcccgggaccctctattatggttcctgtcagagccgtcagtggtggtagctgggcaccatctagttgtactggactcagtttggtggagaccatggtagttgttgtccgttattatctttttttaaataatattttattgtgttttcagtgaaagtttacacagcaaattgggttcctatttgacaatttctgtacaaattgttcagcatataaattacatttttcacaatgtgtcaacattctctttaattgtgttctatttgttccatttccagtactctagtttccctgcccccttaccttctcatgtttgctttagagtaattgttgaccttttggtctcatgtagatggttttttaatggaacactctattcatggataatattctttattttgtataccaatctgttgtttcactaaaaggtgacctcaggataatttcagttcaaggtttaaagagtatctcagggcgatagcctcaggaactcctctagtctcaactgatccagtaactctggattttttaagaatttgagttctgttccaattttttctcctattctgtcaaggtccatctattgtagcgctgataggaatttttggtaatggtagctgggcaccatctagttcttctggtctcaagatagataaggtcatggcttgtataggctgttagctctgtagactggtttcttctctgagactttggttttcacttactcttatatcaaaaagattttccatgttacatgttagattttatagttttcatttttgaaggctgtgcggtattttatgattttctaaatcctactgtttttctcctttttggtcataatagataatgctgcaacaaacatctttgggaataatgacttttgagttctgttgagttattttttttagaataaagtcctaggagagagtaatttcatgcacatcactttccaaaagtgtacacattcacccttaatgctttgtgaaggcaaggggctgtcccctcctgtgcctggtctcctttgcccagcagcagtgcaatgtggtaattatgagcatagtagctttggagtcagagaagcgaggtgaccagctctatgatcctgggcaagtcccttattctgtgtgagccttactttattcatcttaaagatgcctcccatgtaaagctgttagcatggtttttggcatagtaaaggggagctttgtgaggtgccctctctgttggttccagtcaaggcatccagagctgcctccatggggtatgctcagcgtctcagcaggtgtcggtgccagagtgcaggtaaatggcagtgcctgcagctaaatcagtgacatcattcacctccaatctatcaccaaggcctgaactgctgcccctttcctgccttcctgtctctcggataacccaacccctccattccagtccccgacttctgctttgtcatctcttacctggcccttccaacagccatctgatagattttctccttccagtcttgcctcccttcctccagatgactaacagaggattttgtcctaaaacgcaaacccaatcctgttactcactgcttataaaccttctttggcttcttattgcctgtggcataaagacctctccgaatcaggtcctaacccacctcttcagcttcacctgctgccacctctacccccaagcaccctggccctctgaggcattgtactgtgacttgcccccagggctgtatgtcttgcaggatcagacctctgtaccttaattcttttctctgcaggatgcctaggacctcctcccctgctttaagggccgcctcctctgtccctaatgcccccagtggtatgtaaagctccctcctccgctctcatgttggtacttttctctcctccgtgttcccttttacagaatagcagttatcccacagggtgcctggcacaccctcaggacatgagcaatttggtactgtgctttgtttatgtttttccctccagctacttgtgcaggcctacatgtggttgggatcaaccaagagtgaatgactgaatgaatgcaaggagtgttgagaagataatatgtgacagcttgtgatccagggacaggcagtagattgttacacaggagaaagggttatgtgggctctagtaatcgggaaaggcttttaaagggggagagcttcaaagcaggtgacagggtggggcctgaaagacaggctggagagttggaactactgttgggcaataggaaagccttggaggtggtctctcttcagtcttcccgaagacctttgggtctggagcatcagtcagttaataaagctttcagagctgtccctaggttgcaggcagggctttacttgtccccagccttaaggggccatgattcaggggcctcaggactcccaagcccctcctctcctgcaggcagagtgggtgcttcattcattctgccctggacttccgtcttccatcactcacacacgcccatggagccctttgtgatttccccttccaatcttccctgaggaggcccgtgggatgatttgtctgctctttaacattccgaatctaaaagttgagtggacccgagggggctgcacccgcaggcagagcccctaaagacccagctgggtcaattgagccagggaatggtgctgcactgcatttccggagttgatgccgatgttctttgtttcctgacactgtcgaatgacttgaggagggggctgggccagtgaggctgaaagtggggagactgccatggttaaaaataacttgtgcgctgcagttgggtgtgtttccttagcaggagagaggctaggcagcagagacgaggcgggactgctacttcagggtctggctggaatcttcctgggatttcagaattttgtgggctcaccaccggagtaattaaaaggcagctgtacctctgtggggactcgttcctgcgaggcacaggagagggatgtctggaagatgctgggttctctgaagcttctcaggttggaactttcattctgggaggaaatgaagtcattcttgcgcttgcgctggaagccagctgtggccagttctcttttctcttccccacgggtctgagttatgaagccaagtgggggtgtctgagtcagcctcaccaaatacagagacttcccctttcccttgttccatttggtgtcctgagctggtgatcctcagagccttgcctatgcttgagcggcctgatggcggagtcctgttcatcccacatgtctgactagaggaggcatgtcaaggccaagaaacctgctgatctcagtttgcaaagtcaaaacaggttttgggggctccacacatgctgtaacctggttctttttttcatccgcaccttctccctctccctctttgcctgccctcttcttgactcactcacttaagtccaaccaaaaaccaaatcggttgttgtggagttgattacaactcatgacagccccatggttgttagagcagaactgcattccacagggttgtcaatggctgtaatcatacagaatagattgccaggactgtcttccatggtgctgctgggtgggtttgaacctccaacctttcagttgatagccaagtgtggaccattcgcaccactcagggacctcccctaatcccattcccattgaaatgttaacagtagtcactaaagaaatgtcttgcttctatgtatcagctttatcgtttacctagaaatttcatactaactctgtgtggtaggcaggatcagtgttaggatggagacccagagagtttaagggacttgcctatagtcaccaggactggtagacacagatcttctaaccccaaatacattgctattgccatttccttaggcagtacctggcaaccatgccagtctgaatcttctacaggtgacagtttgagtagctgacttgtggggcctatggggagtgggggaaaaacaggatgcgggataggctgtcacatggtatacactgcacaactctagggggcgccagttacatttgttgtcatcgtagatttgcataattcttattccaagtttcctgcaggtggcagtaaagtgtcttgaagaagggatcatgtttgggctaggggcagggttgggtgcaagaaggattcagcattcatccatcagtcacctgttcatccatctgacatacataagaagcaccctctctgttcttggcactgatgtaaaaaaataactgaagatgtggtcctttattcatggaactcagcccaggtgaaaaacaagtacatccctgtgtgtatggtgaagagggcagcaccgtgacccaggcctaagaatgggcctcctagttaaccagtagaaagcatatgtaggagtcattcttgggaggccctcagcagatgctgctgaaatcatcgtccccaatacctgctctagtgtggtctctgtggaaagccctccctgacccctttagcaagcagtatttgtatctgtctccatcccttgtttcagtcggttttatattaaagttcattgtttcctgatttgtttcctccgccagatctggagcatgctataggcaggagtccgatcttacccttcctgatgttgctccaagatctcactctgaagggcggggagagggctgtagggtctagggcctcagtgagggctgtggagtgcggggctggcgtctgctgctgctcttagagccttagctcagctgcaggagtcacgcaggggcctgccctgggacagacagccgtgcctggtccagggaaggaggctgctcctctgtgtcccatgcacctcacctccaggcacaggatgggagctctgagacgacatcccaccggtgcctctctgcttgttcatttattcaataaaaaaagattgagctccagctgtgtgccaggcactgcggagacaactggacctggagtcaggaaacttggggaaatgattgatttcttggagcctcagtttccttatctgtaaaaggaagatgatgacacttgttttgaattcgcagtgactgaacatcagaaagtgctgaccaaacatacagcactgcttgttactgcacctggtggtgtcattccttgaaacttccttgggcaaccaggagaggcaggaaagactccaggtgagcaggaaaggggacgcaggccccatggttctgtccctttgttcactctagggctttatcacatatgatatgggcagggtttattatggccaagccatggataggaagaagaggatgcaggggtgggaaatgggatcctaaaaacaattccattggaaactcctacttgtgagccacaaccttctttgccctgagcctctttgaactgtggaggttctagagctgtgcacccaagaaagctcctcccccttcccagcttgtctacttcttccgggcaggcggtattctcagcagaagagacagcagagatgaggcagctgggctacttgcatttggcttcagtagcaggggaggtgagcgggggagagtccctgaaagtggagcagaatgaattgtagccacacaccaccagctcagctccaagctctttgaaagtaaatctgggtcacattagctacagggatggaaaatgaccacgtgggcagaattctgtgcaggcagcagcaagcaaagacagcagatctgttcttcctctgaggctgagggtccctgtgggggaccccagctggtgagagacgggtggttgctgcattgcaaggtgctgttgttatgcattcggtttcccatcatgcttttctagtgacttcccaggtgacatggagaaagatttggaatgggcagtctggctgatgcctttgtgttcctgagcagcctgggactgggaaggaatgtggaggaggggctgggtaattagggggctgtggaaggctgtcatttctcagtcccatgggctcagggattagacgctacaagtgtatctgacagtgctgcaagatctagggctgcacttgtcttttatttcagcaataaaaggtccgtgaacatacctgggcatgagtaaataacccatcatcaccaaagtgctgtagtgagcttggccagcatctatttccccccagttgctacggctaggacctgctgtgatttggccctgggtcagcctgttgccacctgtcaggtagaagcagccagcttcctggttctgcctaggctccctgcaggagcaaagctggcgctcctggctgaaacctccccctggacctcagatgttgctgcggagaaggtctgagggccctgtaatttgaacagtgattgtgggctgaacattctaagaggtgccccacacctaccccaaaaagtgccaggcctttgccttgcggtcaaggggaggatcctgcctggagcctcagtgggtggtgtctctggccattctgcctccttgcagcagtgtgatgtgcccctccttcctcattccctcttttcctcatttgctcactgctccattcattcacttaagagaatagctttgacagtcagctgtagttccacctcctgccagctggatgaccctgggaagttactaaccttgctgagactcagtgtcatatggttaaaataggggagcaagagagctacctcagactcttgctgggtggattaaatgagacagtgggagtaagatgcttggcccaatggctgctatgcagtcagcacttgatatgtattagcgattatcattaataaggagcccaggtggcacagtggttaaagtgatcgactgctaactgaaaggttggccgtttgaaaccaccagtggctccttgggagaaagatgtggcaatctgcttccatagagatgtacagcctcagaagccctatggggtcactatgagttggaactgactccatggcagtgggtttggttttttggattatcattaatagcatttgttcattcacacagttcattaattcataatgcagtgattcatccctttgctcacacatcgaccatgtatttgctcatttaacaaaaattcctagagccgatttgcgctaggcccagacagggctccaggagccagcccccgtgtgcaaaggcagttagaatgctgtgctacattggagcccaaagagagttatgaggaagtctgagagggaagggcctccccttctgccttccccagattagaccaatgatagcacttgatcttggacttggaaaagaaataggaattgccaggacaagctgaagaaagggcatgttcatgttgcttgtttgtattctcactgtcctttctttggcttcagtaggaaggaagaaaagggaagagaacagttgatgggggttaggaattaaagaatccagagggtggtttgtggagttgcattctggattgagtcctggagctcctaagaggtggtgccagctgggatcccctagtaaataatagctggaaaagctactgtatattgagtcctaagtgtgtgccaggtagtttacatatgtcatttaatcctcatagaaccctgggaggtagtttctcttctctctcatacggaagagaaaagttaaggaacactaagtagatagtggagctgggattcagcattgctccgctgggggctggcggtggggagagggcactttttgcatagttttccatgtgcatggcaccccctggaacacagtccgtacgtgtgccctttggagttgtacagtgctgtggctcaggtcagccttaccccaaaacccctgcaattttcagaaaaatttaaacttattcaaaagttagaatagtataatgaattcccatcatttagattcaagaatgatcagttcatggccaagcttccttcattcatatgtcccacttccccctcctcagttacgtgaaggaagtttcagtaatagtatgcgttaacctcccacagcttttcaccagtagtaaatgtatcagtttatctgcttcagtgtccatatctgaaagctagaaccagtgcctcttgacccacttcctggagtcttcctgagggattctgactcctgaatgccagggcccctgggggagtatgtccctcccactgtcacttggctgatcttcctgtccttccagcttttgaggctcatgctctccccccgagagcacaccgagccaggccggagcataggtggttccgcatctggaaatttgatttccgatgacagcatctgtttcggataaaacactttggatccatgggccctgggtttgaatcagaattctgccagtgtaattgaggaaagtgccagaatatgagttgtcggtcttgaaaggtggaggttgagatgaggtagtattggagtctttgaaatcatggagggaatggtttctgttgccgtgagcagggctgtgccctaggcctgccctcatgttctgatttcaacccagagcagtggctgccactctccaggtctcagggatttgcactcagtgagaacagcttccaggctgcctgttcactgctcctttagaggtttctgtcctgaggtggtgttgggtggggacacattgtttcaaggggaagaaggcttcctaggtaataagccatacttccaggtcccccaaaagtacagaccttgtttggtaggattctcagagaccccacactgcatgagaccctctttccccccagagcagggagggatattgggtgtagctgaggtgggttcatgtcagcctgattccttcaagaaggaaaataagttttatttacagaggctgggaagcaaaggggcccatatcttctctaactactattgttatgttaggaataccaggctttgtgtttatcattttacatgctttgtctgatctaatcctcaaaacaatcttaggaggtaggtgtgctacggtaggggaaactagaacccaaacaattcaggaacttgctcaaggtctcccaggcagtatcaggcaaagctaagaatggccctccttctgcctagggcaccacactgcctccaccattacaaggaacagtagtttaataatagctaacatctgcacagcacttcaaggttcacagagtgccttaacacccattatctccactgagccttggaaagcccctggcaggtgaggtattccatgcccctttgggacagctgcctgtcaggggtccagtatctgctcatttcttcagtaaggattggaaattctttggcactggatttgacaagtcaggggagaaggcctagggagaggctgaggtggagagacttggcgagttgctatggtaacccagatggctgagtaaccattttgagggttgctatggtgacaggggctgccgggtggcaggaatcttgtcttcctgggtggctggcaccattcaggcctctttaattagggatgttgcactttttgaacagaagagggcagcatgatagcgggcaaaggcttcctaccccagagcagttgtgggaacttgaggcaaaagttagaatggatttgggggggtggggaatccgtgccatcaagtcaattccaactgatagcaaccctataggacagagtagagctgccccatagggtttccaaggagtggctggtggattcgaactgccttttggttagcagctgagctctttaccactgtggtgccaccagggctccagaattttgggtatgccaacacacacacacacacacacacacacacacacactagcaaagaatttatttgtaaagcaacaattaacacatgtaaaataaggcagcgtgagccatgctgaagaagtgctggagtcagtcttatagaggttggggcgaggagtactaggagaagaagaattaattttaacctctctctttcctctctttttggtctttcctctctactggagccctagtggtgcaatggttaaagcactcggctgctaaccagaaagttggcggttcaaacccaccagcagctcctcaggagaaagatatggtagtctgcttccataaagatttatagccatggataccctatggggcagttctgttttgtcctatagggtcgttatgagtcagaatcaactggactgcagtgagtttggagttttttgatctttcctctctgcatatgaagtgccctcagcccttggtcattgagtggacaatgaattggattctcaattgtcttgacctttctacccccttcaatatgtcttcggtgaagtacccattctttcagcaaatatttattgaacttctactaggtgcaaagcattgtttctggccctctgatgagataagatgaaatagatatctgtgccctccaagaacttatgaacgagatcaaggaggcagtgatgcagacacccacagtacatgcggttggagccccaggaatgagggaaagaaaacgtggttgggattttaagaagaggttcttccacccgggttgattaaaaataacttcattttgggtgcgttgaagttgggtaggattcagtaggtagaactggggggaggtataggacattctaggcaagggcttagaatctgactatagaggaagatggtacgcacaaggctatcatgggaaatcagcctgtaaaagaaccaaaaaaccaaacacattgcagtggagttgaaaggacagagtagaattgccccatagggtttctaaggagcggctggtggattcaaactggtgactgtttggttagcaggcgttatcacttaaccactgcatcaccagggttctggcctgtaaatgcagatggacatcaaaagaagagctctgaatgccaggcttagaaaagggatgttgtgagagagaagtatacactctacttaaataccctaactgtatgagtaggtagaagccatagacagctgtgtattttagggtcatctggttcattcattcatgcatttagccaaaattttaaaacaaatttttaatatgtgccaggcatttgctagttactgaggatcctgtggaaaccctggtggtgtagtggttaagtgctatggctactaagcaagaggtgagcagttcgaatctgccaggcattccttggaaactctgtggggcagttcttctctgtcctatagggtcgctatgagtcggaatcgacttgagggcagtggttttttctttttaaggatcctgtggtgaacacgacagacaacagccccagccctcagggagctaatgatttagtagttatgagagatgctgaacccgtgactacaactgtgatgggtattgccaaacagggagtaaagggtgcaagaggacctactaatctgggggatcaaggaaggcttccctgtgggagtttcagtagaaggacgagtaggagtgagccaggccagaccaaaaggaggagagtgatgaaaggttacagcccacaaggataacaggtgggaaggccctgagatgagagctgaaagacactgaaagtggctccgctttagggagaggggtacttcagaagcttaagtggtggaggacaccaaggaaagaacaaggttttatttacttgtattacccttctcctccactagatgctctcctgagtacatcctgcctccttccacttcctcattgcagccttcttacaaatgcaacagcagtctcacccatcaggagcaaaggaaaatcatagaccaaaaggagaaagcctcagagccttcccaattgtgtagtctggctataaatttaggctggtgcttggaaaaaaatgaaaaacctccccttcctaggctttcttcttcccatccccccaggagccactttgttcctctatccttgtaaaattttctctgtataaaacaggaacatcagccaaacatgtggacttcccccttcccattcattagaagaatacattacttcaaaatctcttgggagcatttaaatgcaaattttgtcaagaaagcaacttgagtctgagagaagccctctagccacaacccaaaccagaactttcttccttgattaccgtgtttcttaataggaatctcaaccccttaccctctctcccaggcctcccttctgctgcccctcacccctaccccaaacaaagcctgattcccagaatagactctctttcccctcttgcccttgttcttttctcacctttggcaagcatcagtcacagttcttgaggaaatctgctcacaaagtggagaatgtattatccccagtagtgcaggtgacagagggactggtggtgcagcggttaaagcaacagactgctaactgaaaggtcagtggttcgaaaccaccagctgttctgtgggggggaaaagatgctgtcggaaaccaccagctgcagtctgcttccctagagatttacagccgttgaaaccctatggggtccctatgagttggaactgactggatggcagtgggtttgggtttttgggtaatgaaaacaagaaggtagatgtctgggggtgggatggaggtgtatgtttatgtgtatttgtttgtgtttgggctggcttagccgcactggtatgaagtaatataggtaatggagatgactcagcactgatacagtcaagatccccagagttagcatttccatattctctgctgtttacgaaaaatgtgcttatgccatcaattaccaactccttcatcttgcactgcccgctaaaagcctttttcttcatttcaaaaagaatatatctcaaatttactcccctcctttcttaaactgagctcattagcagctgacaccaacctgtgaactagctttttaagcacacaggcttaaaatggaagaaaacaagcatttgttcaaggatcctcgctgtcctctttcaggcccttccctgtatgctctccatgcctagacctgggcaggccagcaaaacatgatggaaaaagatgattaatgggtcgctcactcgatttctgatcatggtgtgatgtggaaacaaccagcatgcatctactagtgaaaagcatcatttcttcttcttattattaatatgttgcctgttgaccaaattcttggcactactcatagggtacaaagttacagtgcatgccttggggtaagaaactcccctttcagaatcttgagaatgggaactgaaatggaagctcaggtcccaattttggctgctcagtttcccatgaattccttttttacttgccagggaagccctggtggcatagtggttaagagctatggcctctaaccaaaaggctggtggttcgaattcaccaggtgctccttggaaactgtggggcagttctactgtgtcctatagggtcgctaagagttggaatcaactccatggcagcaggtttggtttctttttttggtttaatgaactgttactgcgaaatcagccagtctgactttttacccacgaccacctctccactccctgaaagatcaagttaacagacttgatgaggctggggagaataatggctgaatggaggtactagatgtgggcaaaatgtatcacttacatttacctgagttcctaattcactgttcttagccccagcacagcccatgaatattagacacaattaatggagggtcagaaaatgcttattggtaactccctcccttaaaatggccccaagtaaatccctgccccatattcaacagttttatttctttgctttcctttcccctcatgacagagaataattggcttcccttttcctcccctgaccagttatgctccagaatccttttctttgttccataacagtcctccttcagtctcaggttcccacatctctcccttttgatttaagtctctctgttcagatggctgtcacagtttaatagtcctgttgggttttttcctctatagatttatgtcttcctctctctccccttattcaccccatggtgcaattcaaaatgctgttttcattcctcattcagttttcatttctcaggttctggctccccatccttggcctggtttacttcatggtcctgggcctgcccccttcgtttctagttcagtttctttggtttctggaaacgtttgttcctgcgattatttgtgttctcagtgtgcccttcggccttacctgcagccctgtcaggatcttgcccttgtccttattctgaccatgtctagccctgggatctgaggcattttgatctttcgctcttctcctttcccttcagtttttccaggtccttctccagtagctgcagaggcccagcgccgtttctctccagccagggggctccctcctttgtcctggctccgggtgtaggtcagcgctgaatggggctgccctcccacccggtggagtccggccggggtctccctgaccctttggacgcccagcctttcatcttgacgcgcgtggggctgcctacctagccagactctcgcgaaactctgaccgcgtgggccaggctctcgctctccgcggctcgggcccctcaatccggaccggactctggtccgttgccacctggggaatcgtgtgggacagcccgggcccagccggccgcagcccgggggccgaagacgcgccgggccgcggaggcgttggagtgaggggcggggaaccggccgggcctggcgctcctgacaggaggagccgccgccgccgcccggagccgccgccgccgcgccggggcgggctgagggaggagcggagccgaggggtggggaggcggaaacgcgagccgggaccggcggagcgcgagcggacgggtgccaccggcctgaggagcggagcgccactgcgaggccggtcgagccgggcggaaagcggagagcgagggcgccgccgccgccccggagccgcacaaagggccgtggctggggccgtcgccgccgccgcctcagcgcgcgggcctggaaccggcgcccgcggggcccggggagagcgcggcgcgggcggccatggccggctacgtgccgggtcagcagccggccaaccgcagccaggagaaggagttcgtacaggcgtacgaggatgtgctagaacgctacaaaggtacggccggcggagcggcggcgctcgggggctgcggctggggcactggggccccctcggagccggccgggactcgccgggagccccaggcccgcgggccggcgccgtgtggccttcgagtccggccgcacggcccgctgcaggtggggcggccgggcggggtcgcgcccaccccggcgggcgctggggcttggctctaagctgctgtgtctcggggccaatttatttagagttgagataagcctttggaaccctttcccacagtagacggcgcttttcgtatcactagttacgttatttgtcctattatccggccccagctggaaggaggcggcacaaggagctggcttggagacctaatctgtggggagttgctggggaggaggaggaggagttgggcgagagagaaatcatccattctgctctctgtgccgatcttcctctcggagaagcttggacatacgcgtgccgcggagggtccctcgcccccttttgtttcccttagcctcagattagtcgcgggaagacgagagtgtgaaccaccttggttttgggggcgggggtcgggttggcagcgtgtgaggtatttgctcgtgtcagtgaatgtgcagtttttggtggggaacccccccagcctccagcccccagcccttggggcttgagcctgattgaggtaggggtctatttcttttattcctcaaaaataaagatttgtcttgaagcttggatttcagccccttggggctctcttgctaagcagttgtgcaagttaatgtctgatctcaaccttgggtgttcacggagaaagttttgacaggccagagggtctgtggactgcatttcccgaactgttgtaggtgccccttacgtagaagccggggatgcgtggccttgggtggcccctgctttgatctgtaacatccagttctgggaatttgctttgtgtggcagttgtgctttccacagacgtggagttcttcccagaaactacataggcagcactttctcctgttttattcagctcaggtccttgtgactgggcctttagtttttcatctgaaggagaggaaacttcagccttatgactgagtccagcatacttgtttacgacacctacccggtgaagggaaactaatagaggctgtaaaatgttccttttttttttgtggcatttgagctctgcttgggaatgcagcaagggtgaaaaagaaagagagagagcaagaaagagagagagagagagaagaaatgctaaaatggacctgctaggagttctacttttgcatcagctcctgtaaactgtccaacttttcctgcctgcagcaagttttctgtcaaccccctgtggtctttctttttaagaaacgtggttcatttcagagcacaaagaggttagattgtgctgctgaattttgttgaaaaaatgctgctaagtgaatggttcctttaagtttcctttgcagtcttttgaacaatactgcactcttcagaggaaggatagtctggggccctcttgggctgtgacaactttaagccagaagaattaaaacaaaaataggtgaagaaatctcagtacctcactggatcatattgctggtggcctccagctgaaaggaagttggactcctagcaaatgaaactggggaagggggaaataggacatgttccaggagaggtcccttgtgttcagtccttttagctgtctcactcagtttggctttcctctgaaggactttgatcaggtgtataggaatttgatccttctcagacacaggtctctttcttgagggaggaataggtaaaaaatggttggccaaagtaaattaacttgagccgtatgaggttgttgtgcattctgctctgtgataggtgcagaaggctctcttcttccctccactgcaccattctcactgggaggctagagtggcttagcatccgggccttttgttacttggctctatggaattcctgcattttccagacttagaaatccccctgttgccttaattggagaactatttgcctaagcagaggagtgagctggaatcaatagagtgattgggggtgggggcagggaatagtttgtgaggataataccaggaatcaagttttggagagagagggggaaacagataccgatgatgatggtgtttgagaccttcattggttggcttccaaattacttggctctgtctctctattgctattacttgtatagtcatttgctacagtctaaaacaggatttttatattcagaaggagagctgaagtttttagctgcataaactgcccccagaaggggtaaaggtgagaagggaaataatgaatttgcaatgtgcagggagcagaactgtacatattgcggctgtgttaggattggttgtcaagcatggattttccagaactgtgcctggcaaccatttccctcttggtagtgaacatggtcttggcaggattggatgattcagcatggacataaatgctccctcattttccaaatattccaaaggctctttcaggtagctagctaggagacaggaggcatcagataactctgaaccctaacatttcagagtgggcagcaaccaacactgctataggatatccttcattccttcagtcctccaacaaacagttgttaaatctttactggaggtgacacagtttatgcactggagttgccagaatatgagtgagatctggttatggatattttgtcaaggaaagatatatgcaaacaagtttttatgatactgtgataagtgttcccacccagtgccgtcgagtcgactccgactcatagcgaccctataggatagagtagaactgccccatagagtttccaagtgataagtgttagaacagagatatgcatattgtggaagcacaaggagggatgactatctcctcctagggctcattgggagatttgacaaaggagatgacacttgagagtgggccattagggatgaatggtattttgccagatggaagagaaggggttggggagagggcagaggaaataaatagcatgcaagaaggcttgaaggcttgaaagtgaatggaagagtttgaagaatggaagtagttgggtgtgattaaaggacttgggtttaggcaggagcagatgatctgtaaaggagccagggtccagtctgtaaagggtctttggtggctttattccatggccagtgggagagtcactgaaggttaaaaaaaaaaaagaacaactagtgtgctagttttattaattcataatgggggatatatctgtccagtgattagaatacttatgttgttgcccagggcaccctcttccttgtaccaaagtgcttatgaggctgagttcagtaatcagatggttgcttggtaaacatggaaacaaagagaagagaggtgaattgttttgaggagtatttcttccagatgatgatagaggccagccacaaagtttttctctctgtggattgagggattgtgaaaaccaaaggaaactaagaagtaacagccagagaagtaggagaaccaggatccaatttctttcctaggatagagacaaactctactgaagtggcaggctacatatgggaatatttttatatttttagagaagtttaaacacagacacaatctgggttcatggtagttgggtaagcagaaaaagtaatatataaattatggtgtttttacacaaataatgtacacattatatgtttttgccaacagtgcaaccccctccttgctattttcataagcgagctatccatgttatatgtgtaggtgcattatttgtgaaaaagtatagtagttcaggaattagattttctgttttcacaaagccttgaagattacagagtctttacatataaggctgcactaggaataaaaaagaacattaattttcaacattggtaacatcgactctgatacttataaacttcaggattctcactagatgccatgggttataggaagctagttaggactgattttgtttatcattatcgtagaaaagaacttacaaaacataatgcacagagggttggcagcaaagggactgcatagtatttaacatacaaaactagcaaggcagtgtgctgtagtagaaagagactaagctttggatttcttcaggcttggatgccagtcctggttctgccacaccacttctgctgtgtgaccttggaaaagttgcttaccctctctaatctttgggtttgtttctcatctgttgatatgggggtgatagtactaacttcttgagattcatgaaaatataaatggattatttacatatattaggcttttttaatgtttagaaaaaatttcatatgtataatgctttgtattatacaaagcaatttcatattatcgtgtttgatctttataatatcctgtaaggaaggcattatacagatgaataaatttaggcatagagtcttaaattattgtccaaggttttcattatgtcaccgaaggaagttttaaaatcagagcagtggctgcgttaaatgtgattgttatgaaactgcttcagttgttagcatcattattgttaattagtttttagcctctaaactacatttccggatttctggactgtgggaaatttcttctcccctttgtatgagtttcatggtatataagtaacttcgaagtttttacagactgttttgtagtgcagagcggtgaagttttgttcacacactggaagggaaacataggctgaagatttgggattattaacccaagtgcagctctgaagcaacctcttggttaagtgtagactcagtttttaagttcctttttagaacgaaggcctagatttgaaccaaaaaaccaaatctgttgtcatcgagtcaattccgactcatagcaaccctatgggacagagtagaactgcccccatgtggtttccaaggagtggcttttggttagcagctgagctcttaaccactatgccaccagggctcagctgaagtgaatagcttatagacagagcaatagaataatgactactgtggatataaaacaaaacaaaaaacaaagccattgccatcaagtggattccaactcatagcgaccctataggtcagagtagaactgccccatagagtttctaaggagtgcctggtggatttgaactcagaaagtgagccaagttcctctgctgggaaatcagaagctttggccaagtttcacgctgttgaaataataaattgtgtgcatgtgctaatagtgtttatgcgagctgctgcttctgtcttgggcttgcttggcaagtgacgtaatgcaaggcagggaggtgcactgaccaaggcctgtcatccttgtacttgccagtgccatttctaggttttagaggtcatggtggaaagaatatttcaaagtgaacttcagggaacagaaacatcccaagatcaaaagtctcaaatgaaaaattatgggttgcaggatgagcttgtagtgttttctcaatgttcttgagaacacccgggcatgcttccttttactaaatgaggttggccctttcagcttctgattattacatgttgagccatgtgactaggtggtatggtgtgctaaagctcctgcttttgttcttcatgttttggattggtggtgtcctgcctctaccgggggcatttactacttttttggcctggaggagtcctttcagatcagttgacctaatttgtagtatgtaagaatattttttttaagaatgtttattctaactttttttattaccaaaaaaataagagaaccagaaacccattgccatccagtcgattccgactcatagtaatcctacaggacagagtggaactgccccatagggtttccaaggctgtaatctttgtggaagcagattgccacatctttctcccatagagtgtatggtgggttccaactgctgacctttttgttaggaatttaacactgtgtcaccaagagctccttactttgtttttttttggttacttttaataaaatactattattctttccagagcttctctgttcctggcataaattacagtgggtctctgatttttgtgtccagatttcagggctttccataatttgacctgctctgtgtaaccaacaaaaaccgagtagttgccatcaagttgattttgacttatggtgaccctaagtctgtcagagtagagctgccctccatagggttttcattgctgtgaccttttggaggcggatcaccaggcctttcttccgaggtgcctctgggtgggtttaaggcactaatctttcagttagtagcccagcaattaattgtttgtgctgtccagggactccaatagccagttatatcgactgttactgcccaaaatagctctctgctccatctgggctggttcagtgatcccttgtgttctcatacccacctctgtgcctttgtttatgttctctcttcctagaatgccctctctgtttattcaaatcatgtctcttttttattaaagctaagcctgagacctgtgtcctccatgaagctttctcctgttactctaatcagacactgatctctcccttttctgatctcttgtaattagtctaactacatactctttttatttttcttgtattatttcatctctgttggaattgtttccgctaatgaggttttatgctcttgtagcatagggactttttatacttcttttgtatgtggtgtttgattgacagggaactaatttctcacaagagaagggacagttatttcagtgcttgtaacttatattttaaaataattttctcatattacaacagtaatatgtgtttaatgtagaattgtaaaaatacaggaaggtataaagcactttccttaggagtgtgcgtgcgtgtttctgtgtatgtagggatggagggtggagaggcaggcaggcaggcaagttaacagataggcaggcatgctctgaatggtagagaattgacctctcaaggatagaccctttttggctagtctgggaccggatacccttggcttggtgtggctgcctaaaaatgtgttatggtataagtctgccgtcattggtcacaagcgttcatttttttctctctgtcaaaattgctttcttctgcgtgaccatgtgtcagtcatcagggatgtgccaattaccagggatggtttgagttgggccctgggaggagttaattaattgatcactcagcatctttcttttgggcaaggactttttgccagctgcactgctgcattccctcctaccatagcaaatttctgtactgatttttgttaagaaaaagtaaacacaatttctttgtgctggtgagaaaaatgtgcttccttgaagtgtcttttgcagttcagatggttttaaacccacaggagcatgttggtttgagacatatagaaagcgattttttttgcgggggggtggggtggggcggggactgtgctttttagtccatcaacaacaatgaataaattcattgtgtacactgaactctactaatacctgcaagcagatactacgttggagaaaatagtactggggagatggatgggccacaaagaagcattgaaaatgtgatattaagactagggggaggagagtagaaagtcctgaatattagtttgagaaacctgagttttacccaatgggtaggattaatgtagtggttgtataaaagatggtaagaatggagatctaagaggccactgctgtaattgagtcaagaggttggattaagggatgattgtcagaggagtgatatatgagaggcattttgggcaggtacagggacttaggaatctctgggtggaacaaacagttaatgtacttgactgttagccagaagattagaagtgcttggaagaaaggcctggcaatctacttccaaaaaatcagccattgaaaatcctacgaagcacagttccactctgacacacatgggattgccatgagtcagagttcacttgatggcagctggtagaacaaggacttaagtttaggtactaaaattgacaacccttttctaaaagattttgttttgaaaaagaactaactactcctcatctcaagcttttccagaacaaagtcctttttcttcttgtataaaaaaaatttttttttaaagattttattccattctgaacttgttatgtaaggctaatgcatttgaacctataactcaaggttgtgtatcttagcctttatttttcatttaaattaacaacactgagtgccccggacacccattctgtggaaaaccttcattgtatacttctaggaatagtgccaagaattgcataagaaatctccttaaatctcttctacaatcttcagttatatcttgatgtgctgatcttccagggtgtcaggaggccttgtttgaaggatccgttcattcatttaattaataaacattttctgaatgtctactctaaaccaggcagtagtttaagtgttggagaaacagataaagatatcttgcagctctattatcatacagttgaaagggggaaacatattagtaaactgacaattaccatccagtcagtgtagggagtgctataatatagataaatgccgttgctgttggacgaagaggagtacttaatgccgccagggtgggaaagggccaggaaaggcatgggaaagggccaggaaaggcatgcaaaaggaaatgaaacctgagctgtcacctaaaggcgaagagttggggaaaaaggggtattctgggcagcatgaatacaagtaagaggatgagagagcttgagaggagggcacataggatattagtaaggttggcgagcaaggcaggagggaagaactgagatgatgaaagtagaaatgagaaggggtaggaaaagtgcgcaggactaaaatgttcctgaccttgtatgtcatactgaaaagagtgtggacttcatcccaaaagacttttggagccattgcagaattttaggcaagaaactatgatcagatttacatgtagaaatacttccctttggcagcagtgtgaaggaggattggagtgtggcaagactagcgacagacgagttaggaggctgctgcagtaaggtaggcagggagtgattagagcttatggggttgtggaactagtgaggcagcaaagtgggagaatcaagaaatgttaagggataaaatcccatgttttgatgactaattggatgttgtataggaggggaaagagaacgtaggatgacttgtaggtttctggcttgggtatcgggatgggtgggtggtatcattactaaaatagggcatataagaagaggaaggttatttgtggtgaactggtggtggtgatggtacaggggaaaatagtgagttcagttttgattgtgttgaggtcaaggtttctgtgagatactggatggagatattcagtaggtagttttttagttggttgtatagaatatggagctccagagagctataggtgaagctgtaattagcatattgaatgaaagccaggagagaggagaaagagattcccttagggagtgtgtgtgtagagtgaggagaggactgtgacaaaaactttggggaattccaagggaagggtggttgcagtggcagaggcagagacagaagagcccctgaaggaaattgcccacagaaaattggccttgagaggcaggaggaacaggagagagtaagtttcaaggagggcatggaggctatgccacacagtgtcagattctgcagaggtcagacaagataaggactaaaggtgtccatggattagcagtataaagattacctttaccagagctttttcagcagagttgtgattttcagtggagcataatccagaaggcagtgggttgaggagtgaatgggaagtgcagaaatggagttgaagtttgaaacctggactgtgaagggacggaaaggagaaaggcattatatagagagcattgggtggaggagttttgtttgtttactgtaacataggagaaacttaatcatgtttaaatgtttttaggagtgtaggatccagagtcaaaaaagagatttgtcttatgagaaagataacagagaagaaggcaagaatgttagtggttaagttggttggtaagaggtgtagggagcttggggaatttccttgctcacccttattctgtctgtgaagtgtggggtgaatttatctgtcgagagttaggggatttgggaaggtttgaaacagtcaccaagagaaatgggagtgtgaactgataagccacaaaatagatttaccaggctgtgctgagggctgagttaagtttgtagtccatgaatttatagctacagtaccctgagagggagggtgaggatggggaagggaaggaagagaggtgttttctctccctttagcctcaggagcactcaataacctaggggtagatactgagaatgcaaacaggtgtgttgatctaggatcagagttttccaggatagatgtattggaagaataagaggttcttgtagtttgtatggaactctggtggtgcagtggttaagagcttggctgctaaccaaaaggttggcagtttgaatccaccagctgctccttggaaaccctacaggacagttctcctctgtcctttaagccggtatgcctcacagtcgactcgacagcaacgggtttggttttgatttttggtagcttgtctgaaaaatgtagaacctacttaattattaattgtttcatactctctagctggtttgtattttgtaccccagcaaaaccgtaagctcctttagggcaggaaccatctatttaacttttacactcttctatatcatttagagcagtagtggcacagtggttaagagcatggctgctaaccagaaagctggtagttcaaattcaccagccactccttggaaaccatatggggcagttctaccctgtcctgtatggtcactatgagttggaatcgactcgacagcaatggattttttatgggttttatattatttagtaaagtagtgggcagaaattgattcttaatatatttattcacttaatttgccgttcatggttaggggtgtcttgattcaatatgttgttgttaggtgctgttgagtcggttctgactcacatgcaacagaatgaaatactgcccggtcctgcaccacgctcgcaattgttatgcttgagcccattgttgcagctaccatgtcagtccatcttgttgagggtcttccattgtttagctggccctctactttaccgagcacgatgtccttctttagggactggtccctcccgataacatgtcccgatataatgactcaatatagagagagctttttccacctgtggtcttgaatacccatctcactgtgtgatatggatagtgaaggactcattgatttgggaatgaactccaggcctgtcttgggcataaatctcccaggctagcttcactactgtccccagtactgttgggcttagaaacatttgtgagctttgctttccatgaagattgaggaattagtacaccccattccgtttggaccaagcttgtgaagacctgggttctttacaagattagacagagtggctcttgtggaagaggcagccgcctacttgcttattttggcaggcagacagtgaatgtgatggatttgttctcatgactcagagccctccctgccttaccttaacaggctctatgtaatcactacctttcaaagagtgataatgtccttcagagtttatcagacctttatatctgaaaacagtattagttaccctttctttgtccttttctacttgcttggtcccccggccccctccccgtttagtctagtatagaggatatttcctaatgtattaagtcggttcagtattgtcttaggtcttaccccttttggtactttccgcatcctttggttgttaactggtatgtttcccacagtgtggcttgttttctgctccttgttttgtaaatttggactctgtatcgaataaacttgacatgaatcactcagggagtggaaggtgtgtctccactaatttggagaatctttgatcttgtttcagtccctaatttggcatatccggtacagtttctcttcaagtcctgcaagaggggtgtatgtatacttgtgtgtctcttgtctctggtttcacacattacaggtggatggtccactccgggggatgtcacttagcaagtatgaactccctctactgttcttgtcgtcaccatcagcctctataaagagcctctttgaatgtatatagtactgaataaattaagttcataaacccactgtctgcctgtaggaatttacagtatatactagacattacaaatgacaaaagggaataaagaacatgcaaagagttgaataaataatggatggttactcctcatttttctgtcattttcacaggagaagatatactaaaaagaaacagtctagtgggaaaggggactgacagagagaagatcattttctgttctaactagagtgtcaggagctgctatccacagcactttggtgccaggcattttttctcttaatgtcctttccagtcatgtaggacctcgttgccacactattttcccatacaactgggacaagatcctaaaggagcccttgctttcccctgacctgtggccaaagtagtaggctccagtttccagcagggagggcacctggaaggcttgggtcctttgggtacaattatctttgtaacatgaggaaattcatcccagacctactgcagacacttgtgtgctcacaaacaccacaaactgagcagcagccagggctcttcatggaatcagtgttgggttgggaagaagtttgcttggcctaacctggcctggcctggtctagtctagggtgcctctagagggcaagaatgtaggacctgtctcagcctctcttggttagttttccacatggaaaacaggaattagattggtttagttggggtgctttgagattctcacatctctcagagaactggttcattgtttttttttttttaattgttatttttaataaatatgataacaatattcatgtaatgctgccttataaggaagaatgggaacctgtcaggggctggaatttccctctacccttcccgtggttgagaaagatagggagcgttagattcccatctctcaggtctcctttctctgatcatcctgtgggaggttcctgggaaggggtgaggcagtagaaggaatggtccaggccctggcaggaatatacctttgagaagggataaaaggtatggggacactattaagggggttattaaaggcagaaaataatatttgttgttgtcattggctgctttcctttgcctatatatgttgcctaagagcagagccaaacccctgcattcttttctcctcctcaccctcctcctttttttgattacatctcattttctgacttgtaaagatgtacaatgccttcagcagataggcttgtgatgatatggaaagttaaatatacaaaagtttcagaggttggaaagctaagtggtgatttaattatggtccttaagtgtaataagttttaatccatcataaatcaaaattatcttataacatttcttgttatgttttgttacttaactttttgtgtatgtttgcttcaacttcccaacttaattgtgatctctttgaaggcttaaccaaaccaaaaccaaacccagtgctgtcgagtcgattccgactcatagcgaccatataggacagagtagaactgccccatagagttcccaaggagcgcctggtggattcaaactgccgaccctttggttagtagccgtagcacttaaccactacgccaccagggcttccaaaggttgtcttgtcaggagtgggatgaaggcttaggttgtgtcaaatgagataatgagataatgcataagatgtactttatgaattgaaccaccttgcaaatggtggtagttgtacttcccacaacttctagcacccttcatgctggatttttccacgtgattgtcccacagacatctcaaacataatctgtccaaaatgggctttattttcccccaccccgctccccgacctgcttctcctcctgtgtgtcccatctcaataaatgacttccctatgcattcagttgtcaaggtcagaaacccgggctgcatgcctgtctcctcccactccctcatcctgcccaggcagcagtctctcaccaggtcctgttgattccacctcctaaacctctctccatctgtcatctcctccatcctcgctgctaatacatgagttcaaggccttattatctcttacttggactgctgtaattgctcttaactagtctgacttcactcctcgtttagtctttcacactcctaccaggggaaaaaaaaaaaaaaaaacctttcaaaaattgcaaaactaatcatgcctgttcccgacttaaagctcctcagtggttcccattgcctagaggataaagcccaagcatgcaagaaaaagtttttcacagtgtagcccctgcttgcttctgtaaccccgtttatgttcagcttctctgcagtgccaggctggagaatgtgggttttttgcccatgctgttccctctgccaggaaaccctggtagcttagtggttaagagctacggctgctaaccaaaaggttggtggttctaatccatcagatgctccttggaaaccatatggggcagttctactctgtcctatagggtcgctatgagtcggaattgactccacggcaatgggtttgggttccccctgctgggaattcctcttttacttgctactcttacctgccagcaaattccactttaacttaccaaacacagttcagacattgtcactattgggaagcctttgctgacccatatagttaatctctttcctccgtgtgggttgtatatactctgacaatgcctattgcagaatattgttgtttaacttgtgtatatggtggtctctccacactctgagctctctaacctagcccagcacctagcacatagaggtaggtgctggagaaatgtttgatgaatggattggttatgatgtttgttcactgaatgaaatcttgtataatagtggtattagaagatagtgggagaaattttagtgagcctaaggataataacattagattgttgggatgtgtgtcatttttgcttttgaagaattttgggaagaaaatagagtactctcatggatggtttaattcttcatttgctaaagacaggaaacagatgttcttcttaggttcctttcagacctgtgactctttaatgtgaatatatggccagcttttcatctaggatttaatatgagacccttgagctgagtgcattgtgtatactaaatatattatggatccttttcagagctcaagtctacaagtgttactatcagatgggcagttgtagagtgcagaatataataaattccccttacaccatcttttaattcctatttcatagaattttagaagtacatgatcccctgccctccatttcccaaacttgcttttccgctttggcgtgttacagttctagttcacctcactctggaactcactgttatcatctaacatcttttacttattttgtttattgtttgattctgcctccctattagaatgcaaactccttgacagtgaagatttttacttgtttactaattcatgtatctctggcacctagaagagtgtctggcatatagcaggtgctcaataaacatttgttggatgaatgaactagaaatgatcagttcagcccattcttgttcctgataaggaaatcaaggcatggaaaagcacagtaacttgttcaacgtcatataactagttagtggctaaagccagatctcctgacaaccaggtgagtgatgtttttcatgaaaccatgttgaatcacagtttttttaaatgcgatttggtccttatgttcattatggacttaactgtatatccctatgagcaggggttgggggaggaagttaatattgagcccttactaagtgccaggtagcttatgtcatttaatcatcataaatgatatccagtaatattagctgactttacagttaaggaaactgaggcttaaggaaactaaataactttcctgagggtcacataactagtaagtgactgaactgggttttgaacccagatctgattaacactacttggcagtaggccctcttaccttaaggtacagtatttctgaatttgtagtctgaattgctttaaatttttttcaaatcagactattcttgaaattggtctgatttgagccactaaagtagagtttcagaaattgtttaccttaaaacaaccccattgagcagcggggttgtgtaagaagagtctgtagggctcttgagtcataagccattcttatgctgtgcgcagtactacatacttccactcagctatacattaaaacaaataaacctattgccatcaaggtgatgctgacttatagtcacctaataggacagaatagaactgcgccataggctttccaaggctgtaatctttacagaagcagattgccacagctttctcctacaaagcggctggtgggttcaaactgttgtccttttggttagcagccaagcgcttaagtaccgtgccaccagggctccttagttatatcactacatagttcaaattccaagattcctttttttttctttctttcttttgttgcactttagatgaaggtttacagaacaaactaacttctcattgaagagttagtacatgtattgttttatgacattggttaacaactccacgacatatcaacattctttcttctcaaccttgggttctgtattaccagctttcatgtcccctccggccttctagtccttgccccagggctagtgcaccccattagtctcattttgttttatggacctgtccaatctttggttgaagggtgaacctcaggagtgacttcattactgagctgaaagggtgtctgggagccatactctcagggtttctccagtctctgtcaggccagcaagtctggtctgtcttttcgagttaggattttattctacatttttctccagctctgtccgggcgcctctattgtgatccctgtcagagcagtcagtggtagtatcaggcttcctttttcacccagggatctagaacaactgtagaaaggtgatgatgatgttacactcttctgcactgcagccgcttctgggtgtttggtagtgctcttacacatcaagggcacaaacaaaagcaatgtctaaaatgtaggacaggtggagagggagaggactgaacccaattgaaactagctgtttcagcagtgagtaggcagatcataatcacctgtgttgcttggatacctcagctgagagtggggatggggacaggccacacccattgtctttggagaaatgatgggagcaaatacccctttaatttctgttttactctggaagcatttgctcatctttcagaatcatggtgggaatgtggactttgagctgacaactaaaaaaaacacctcaaatcatcagattaacattttttctttagagagttccccgtaaataccatggctattcattttgagttccctgttagcttcctctggggtgtcaggtgaaatctaccttagaaaggagtgggggaggggcatgggggatggagaaagaagaggaaaatggaagtgtcagagaatcaaagcattaattagaaggttcctctgtccttgggagttaaagtcctttagttgaactgggagatcatttggggaggagacctaggaggaggagttacaatgggaaacaggacagtttcatactcagtgtgcgtttgttcaaggaccagcagcatcggcagcttgttagaaatgcagactcttagcctccttcctagacctgctgattgagtcttctaaaatgcaagcgttccaagtgattctgtgcacattaaagtttgagaagcactgagttggtgattacgtggtcaagtgcaaggggctttggaatctgatagacctggggttgaaacctgatttgactatttactgcttagctgtttgattttggataagtcgtttaacttctctatgcctcaatttctcatctgcagaataaggaaataaccttgtagagctgttgggaagagtaaatgaaatagtggtgtatgttacagctgttgatgccctaggtccaatgaaattcagtaatgtctgtagaataccaaacactgaacctggcacatagtaatgttattattaataattcagttaaggaaatttatagaaagaaagagctccctcccgttaatgcatttgtcttcagttttataatgttgtggtcagtgtgtgtatactctttagtgttttgcttgcttagcatttaataacagtagttgcagcagcagttaacgcctacagctcttattgatgtgccaggcactggtttaagtattttgtatatatattaattcattcagtccttgaaagagccatgtgagataggtttattatctccgttttcagatgaggaaacagaatggttgtgacttgcccaagatcgcacagctaataaggggcagagtcgagatttgaactggcagtttgcctccagcatctgtgatctctatttccatttattgctgttgtcctcaaagtttgaggtcacataaattacgtggtataatagaaattaggagacttaggttggtatgatacctcattctgccgataatttatttgtgaccttggtcaagtcactttaatctctttgggcctgtttccttattgtgaagtggagggattagatggaatttataaggtctcttcattgattcattcaacagaatgattgcaatcaagagcttggaagaaaattatatctagggaattagttctaaagtacttgttcaaacaggaaggtgaagttaagaacaaggtgtttgaatcttggctcagccacttcctgacggtatgacctcgggcaacttatttagcctttctaaacattaatttcttcacaagtattatagggagagtagttcatacctggcaggggtgttgggaagtttggataagttagtgtgtattagcacatagcatatccaaggcacgcagtggatactcaatactatatacatgtgttctctttccttctttccactcacccaaggggtggttaaggaatcagatatataccagatttaaaaggggatgagaatctattctggccctaatatctttttccatagtggtgttcttgttgttgggagatgggaattagtagggaattgtcttagttatctagtgctactataagagaaataccataagtggatggcttcaacaaacagaagtttattctctcatgatctggtaggctggaagttcaaattcagggcatcagctccaggagatggcattctctctctgttagttctggaggaaggtccttgtcatcaatcttcccctggtctaggagcttcccagcacaggaacctcacatccaaaggatgtgcttgcttccggtgttgacttcttggtggtatgaagtccccatgtctctggtcgcttctcttttttatatatcaaaagagattggtttcttaatggtctgacggagactagaaggaccctggagatcatggttcccagaccttctgttagcccaagacaggaaccatttacaaagccaactcttcagacagggattgaactggactgtaggatagaatattatactggtgaggagtgagcttcttggatcaagtagacacatgagactatgtgggtggctccttcctggaggggagatgagaaggcagagggggacagagctggctgaatggacatagaagtggagggtggagagaaggagtgtgctgtctcattagggggagaacaactaggagtatataaatttttgtatgagagactgacttgatttgtaaactttcacttaaagcacaataaaaattaaaaaaagaaaaaagttataataaaaaagattggtttaagatacaacctaatcttgtagattgacctgcctcattaacatcattgaaggagaatttacaacacataggaaaatcacatcagatgacaaaatggcggacaatcacactatactaggaatcatggcctagccaagttaacacatatttttggaggacacagtttaatccatgacaggaaggaagcatacatatagccaggtcctatttttcaataaccactttggattttaaattacaattcctttttagaatacatagtttatagcagaataaatgccaaaaatttttttaatgattgtttagacactttctaacctggagtgaggaatctatctgaaattagtttttgctggtcttttaagattatgatattattaagattctcttggtagggacccagatttaccccttgtcttaattctgcatatacttttggcagcattaaggatagagagctgagatagacctggtttgtggttttggtgggagatgcctatgcctcccttttctgggccgaatagatgaataactatcgtgataacctcttgctctcaagtcagtttcaactcatggcaacccatgtgttacagagtagaactgaactccacggggttttcttggctgtaatctttatggaagcagattgacaggccttttttctacattgctgctgggtgggttcgaactgccaaccttttggttagtagccaagagcaaaccatttgtgccacccagggaccttaattataataataaaaccagaaaccaaatcagttgccatctagtcaattccgactcatagcaaccctataggacagaatagaactgctgcattggttttccaaggagcagctggtagatttgaactgtcaaccttttggttagcagccgtagcttgccgtagctcttagtcactgcacaccagtgctccaattataattgccgtcaagtgggttccgactcatagtgaccttatatacaaagaacgaaatactgcttagtcccgtgccatcctcacaatcgttgttatgcttgaccccattgttgcagccaccgtgtcagtccgtctcatttaggatcttcctctttttcgctgactgtctactttaccaagcttgatgtccttctccagataccgatccctcctgataacatgtccaaagtatgtgagatgtagtcttggcatccttgcttctaaagagcattctggttgtacttcttccaagacagatttgtagcttccattaattgagtttttactatgtgccagggactatgttaagcactttctatacattatctcacttaattctcataacaaccatacgaagtaggcattatcactattttgcagtggagaaaagtgaggttcatcaagtgaagaaacatgcccaagctcacatttacgtttggtaaatgatagagcaggcattcaaatctagctctgttggacgacgagttccagctctttaccacaaatattaaaaaaaaaaaaacccgttgccctcaagtcgattctgactcacagtgaccctataggacagagtagaactgccccataagagtttccaaggagcaactggctggtggatttgaactgctgaccttttggtcagcagccgtagaccttaaccactatgccaccagaatttctaagtactttccttcaatttcttgaatagaactatgtggctctaattgccttcttttctctaaaaacttctggttctggaatcatgctgactgaagggatcagggaagtgacctttacctgcattcttgtgagctcttactgtttgtgaatggggaaggttgtgtgacttcagttggcacttcttacctattggtttaagttttgccagcgtccttagtcaggtgtgggacattgtgggttactcaaaaaacccaaactctctgagaacttgagaaaacacgggcctactgtatttaatagctgttcgttattattatcacaaaattacttatgctcattgtaataatttaaacaatacaaaggaaaaagctctcttttctagtctcttttcttcactaaaccttcaaggtttagttgtatacttccagcttttttctttgccatgcttactttagaattactcttctgcctcctttactcctttatattggtcatgtctattcttgtctgataagccttacctcttaattatttttgttgccatacatctggcttacttttgggtcttcatttggtatgtaggatctgtgcctttgctaaagccatcccctttcttgtaagttctttcccctaccacttcttctagtaaaatctttccctttcccattaatcctttgcaaaccatgctaacccatgacaaccccttctgcttctgaactcgtagcactagcttctgccactcatttgctagttgaccatataaaaactgtatcaacgcttctattttaatgtttgttatttaacttctcacatgtttgcccagttaggttgtgctgctggagctgatggattatgatttgttctcttattccccattttgcctagcacattgccctacatttaagagacattcaccagacgtgactggattttcttggtccttcacacccttttaaagatcaggtgcccagagccggaagcctcagggaacactgatgtcatcttggctgcctgtcatgatgaggtgtgtggcattgagaggagtgcctgggcagatgaaatacttgtgcgacaggttatgtttccttccgggtgggtaagattcagactttacattggggaaaagagacagtaagtgtaggaggagggctgaaaaggcgatggaggggagaatgcgccatggttagacatggagatatggctttattaaaaaaataaataaagggatgatgtaatgcagagagagaagcttcttggaaccagtaggctgattagagaaaccagcttctctggtgcaaaccagttattaattgccatttattttcttttcaataaaattgtaccacccatctacttgctttctcattagggtgagtctggagaaatggcttggattagaattaagaaatccaagagagatgcaggttagtcacagtagggcaaggaaatggatattcctttctctcctctatcttaccagccctagactttagtatttgtcaggacctccttgcatttgccagtaggggttgctgctggagtggtataaaacctctatttctacctctcttactttgttgtgccccattttgctttccttcttcactgatgccttcctgccacacatactagatcagtgttcccatctctgaggcccaggcgtgcagtggaccaccctgcctttagctgtttaggccttcatcagatctaccattctactctcactctcccggcccctcaaattgtaagaaggcagagaaaaggaaatggagtgtgatggttttagctcttctgtgacttagggggcataatgttttgattgcttgatttaggggtcttctaatatgaggagaggagctctggtggtgcagtggttaagagctttgactactaaccaaaacgtcagcagttcaaatccaccagctgtcccgtggaagccctttgaggcagttcttctctgtcctgtaggcctctgtgagttggaattgacttgacggcaacgggatgttttggtttaatatgagaaggcgccctgatggtgcagtggttaaagtgcttggctgctaaccaaaaggttggtggttcaaacccaccagcctgctccttgggagaaagatgtggcagtctgcttccacaaagatttacagccttggaaaccctatggggcagttctcttctgtcctatagggttactgtgagttggaattgactcgttggtggtaaatttggttttttggtttggtagtatgaggatctcttcttcttattgatagaaagtcctcactccattcttcattcttttgccctgagtaatatgcacccagagagtcttatgttagaggttggtacttgtccctgaaggagaaaagaccactcttagacttgatttttttttccattagtgaatgtctcattatcagaaaatgagaattaatggtgttttgtaaatacagctaagaccctaatgactgaacttttggtttaaaaacatttctttttagagcatgtgagtccctgggtggcacaaacagttaagagttccgctactaaccacaaagttgtcagtttgaacctacctagagggcctcagaagaaaggcctggagatctgcttccgaaaggtcacagtcatgaaaactctatggagtgcagttctactttgcaacacatggtgttgacatgagttggaatctactcgggggcaactggtttggtttttttggctttaaagtacattgttttaggatagattcctccctactttttgtggaatgacttagctgcagaataacctggagggaataacaatactaagtgaccttttatagatcattacgcattgtgatattactgagactcttggtggaggagagctttggtctgcaggtataatgcggattttggtgtttactcctttctttcccttcagataaatcctccaacgggtctcattcgttggctctgggagggaccaacaggaacgaaaagctcgtacactcgttttgttgtttaggtcaagtttcctgggtggggctgtgcagagcttccttggagagctgactcaaatacactcttccattgtggtggtgtacttgttcttacatgtcacaccagttggaattttgggcagcatcattgggaggtgttaagttgggaatgaataaagtaaaagtattttcaggggttcatttaaagaaatgttcctttcactgggtaaaccaagtctgcctagatgctgtggctgagaactgaagagttctaagcatatactctttgatgccagcaattcctctgcctttctatccttcatgagactctgagctctttgaagctgggatagggtctcattcatttttgtgtctctcatgtttagcacagtatacaactcgaagctattcataaatgtatgttgggttgaatagtagagggaagctttaaatgcactgactgcagacagcacacatgctttgcataatcagttgggaggtatttgtagaaagtggagatagttagtgtaaaaacagtgtgggggcagggcctgacctcccctaacttcccaatggtaacagagaatcaagaccaactgcccaaggctctgcttctctgctgaatcaatggccacagaaaacgcacagacaatactcacgattatggggttttttagggcagtaacaggttacaattcagggtcgggaacactcaaagatacagttcttccatcaggacagcctcttcccagctgtgcttgcaggcacacctctccctggccctaggcctgtccccaaaggcactcagtttctctctccatgggtcaggaagcccagcgctgtctactgcagctgggtgtctcctgccactgcttctcacggtcttcagggttatagctgtctcttttgctagctcagttgctctctgctttcttttaaggcaaaactgaccaatcctcttggtgggcacaattaccctatcacacagtcctgcccagccacctgggtgggagttacaagaccatggtgagaaaggccatactaagtaatccatcacactgtagttaggaaagatgggtaaagaagggaacttttgtggataggacatagagaacttttgctgcctaagaattgcttgggaaacaattgttttgcagctgttttagttccctcggactagctaatgaccttggacaagacttttagtcactgtgaccttcattgtagcaaggactaaaaattcctgcctatccctcaaattgagggattgaaggaagggtggagctcaggattagattgggggtggggaaagaaaggattgagcccccctggtagccaggcactgtagaaatataaagctgttttatgatgattgctgttggcatacagcctcttctctcgcttgaaccccacctgttcataacctcagagtgggtggatgcagactttacgtattggaatcacctgtagctgttggcagatgtcccttgtggtttctcaggatattgtacaaacattacttcttggctctttccttctgtccatcaaaaaaatatagggagtttgtggagaatgtgcttttggtcggcttcagggagtggaatgccttcatttttcccatttacctagtaaatattcagacatgccatagcatgagggtccaggcttggaaattcttacctagggagtgactgaagcctgagaggaactggacgttgcacaaccccctgctttgagaacagagcagtcatttccctaagcatggcttggatcccagtcagctgatttcctgtctctctagggatgtgatttctcccccttccgtcttgtgtcttgtggaagaaatggatattttttcatttcctgtttgatagtgtatttccttagtaccaggagacacttggtgactataaatcagttagagcgtgggggtgggaaggaggctttttcagtgaaatggctttcatttgaggaattcaaagcgtatacgtaaacccaagtttccttgccccttctcccctgggcgggggagacacaggacctatggggatgtgccctgtgttgccatgtggtggtagaaccctttctaccacttaggagagaaaagcttgatactccatggggatctccatgctgtggattccactcttgtcatatcctctggtcagcccttttggtatctaaattcactggggatcaactgttagtccctggcggaagtgacaccatgcttgaaatggatcctggcaggatacccctctgagcccagatggagtgacactggctgggactggaatctggctgtcctgatttcctgtcctgtcctgtcctttcctgtccttaccagcagaccctgtggcccttctgggaggcaggcggtggtggaggtgggggagctggctgctagcaagcagcgccacctgtggacttgcacagcagcttctgttttccaaacaccaagagctgccggtccagtctggcctgttcctgatccatttggagagcaaaccaagcccactatcgtcctttcttactcatatcgaccctataggacagacacagagtagaggctataaatctttatggaaggagactgccacagctttctcccgtggagcggtctggtgggtttgaactgctgaccttttggttagcagctgagcacctaatcactgcgcaaccagagctccttctctggagagcagaggactagaaaagagaggaacagggaggatatagttgtgatccactttgcttctagaacagcttttgcttagtgtttggggacctggggtttaatattgcaacacactaactcttagtgttttttcttgaccttggagaagtacttaaaaagtcttagaagatcgggcactgctttttagattatgaaaaatttcatttttggcttttgtgggtattacaaacagcttttcctagttgctaggtaacttggtgtgttgaaagttcctagagaccatcagaggaagaacaaacagccttccaagtggaattagtgagcacgtgcctaacttttaactgtaaattcttttacctctgttgctgaccgttgctgaccatgtaccctttctctttgctccaggggctttctggtttgtggctattttatggtattagataaatttcccatatagggtgtaaagtagcatcttatcaaggtataggctttggaatccttgttctggtatttactagctctgtgaccttggacaagtcatttaatctctcagaaccttgtgtgctttttctaattcctcgtttgcaaaatgttggtgataataactggaagggttttttgtaaaggttaaatgagttaatatatgtaaagtacattgcttggtacatagtaggcacttaatatagtagcatatatgtaaagtacattgcttggtacatagtaggcacttaatatagtagcttgcttttattactaggagtcgtaatagctataattatttttaataataataatgctgaactgattctcctaaggtgaactaccttcaaagctgagaggaaggggatgaagtggaagaaagatactcctgtttatgtgttgacttcatctctttgggtctggttacagatctgttttgatagaagtctgacaaatggtagagcccattttctacattcttgtcttggcagattgtgttaactcatacagagggttcacacctggcagaactctaggaaaagaagtgttttacttccaagtctacttttctctaaggatagacagctctacagcacctttggcttaccagccttgccttcctccctcctcctctcttcccctcctcttactgtgaatgggattcttgatgtcctaacatacctaaacccttggtttgtttgttgtaggtcaggggctgagggggaattgctgtatagctgtggggtgatgggcacaatgaatgaccagctgtgtgccagcttggcttgccaggttaggatttgcaggatacacacacacacatgtacacgcatgcacgtgcacacatgcacacaccccatcatggatagttgacacaatgtagaagctacatggtcttctcctctgggttcctccaacccatccgagcaccagcatgtctccatgggaattaaaacatgaagacacttagcaggagggtctcagtagcttagataggctcttggagtgtctctaaaattctgaagagtacttattcagctgtgacttctctgctaattgccaggcctgatttagacctgaaaaggcctaagagcccaggttcctgtatcctgtgcttatgctggacatgggggtagaaggtaaggagagacagcccctccaaattcctggatccccatcagtgggttctcctgtttgtttatagagaatattgttgtatgtcactgagtcgattccaactcgtagtgaccctatataataagagtagaactgtcatgtagaatttcctaggctgtaatctttacggaagcagatcaccaggtcttttttccaatggagccgctagtgggttcgaactgctgacctttaggttagcatctacgggcttaaccgttgcgccaccaggactccttttatagggaataaagagtggtttggagccctggtggcacagtgggtgagagctgcggctgctaaccagaaggtcggcagtttgaactcaccagccgctccttggaaaccctgtggggtggttctactctgtcctatagagtcaccatgagtcggaatcgactcgactcgatggcaatgggtttatattgatttgtccccagtaccttctctatgcttaaggagagttcagtgtcactggggtttttcatccagttgtgtcgtgaatacagggacatatcccccctcagtgctccctctgcccaactccccaactccccaaattggcctacacttctattccctgcttctgtatctccaatgcctagataccagttattgtttagaaagctatccagtgattttatgctgtcaacataatatgaatggattctagattaaattaatatagaccacatttagccttagtcagttatgattgtataagtacatatgattaaagaatcatgtttgtgcttttgtgaaggctactgtaagagaagatctaaaaataaatctgttttagagaaagattaaatatgaacgacagtagggggcacttgtatgacagcggagtaaagacaagctcaggaatgttcagtttggaattttgaacttttatttttacttgttccttgaagttcatatttttcccttatgtaactttatttatgtaaaactgacagtgggttttttaaatataaaaatatttggcatgagtaacaggttatatttactctttgtcatctgaaaatggactttcttcaaagttaaattaatttcctttcaaatattctggcatgcaagaattgctaggttaaatgtacattatttcatccaactacaatcaacaaatatacaaagctctaaaaatttgtctgaaataatctattggaacttcagtttctgtatcaacaaatttatactatcctagattgtatgctaactgttgctcaggatcttgttaaaatacttcctgtacaaaaacaacatgtgaaaacaaaacaaaacaaaaaatgagtgtaccttatattgtatttaaatatagatcccaacaaacacttcaaaaaaaatggctgggagggttgaaccctttccaccttattttgctgttggtgttagatgaacgtagctttctcttaattgaatgatgctgaagggtccttaaggccaaaacaacctttgtaaactgtttctctcttttcctcattgaattcccaatgagaagctttgataaggaattaacagtgtcattttcaaattggcctctgcacgagctatgtaattatagctattgcatacagatgatacagctgactcttcatcatcccatgaaaatggagcgagcatagtgcatgctgaatacttcagattcgcaggtaaatcctgaaacgaatttagccaactgttttgtcatttactcctacttaattaccaaagacgcttataggggaaaaaatggacagattttcccctttacctatcttttttttttggtgcaatatacacagcaaaacatacaccagttcaacagtttctgtgtgtagacttcagtgacattgattacattcttcaagttgttcgaccattcttgctatccttttccaaattatttctctaccactaacataaacttactgcctcttaagattctcatctgaccttttgagttgctattgtcagtttgatcacatatagataattctttaaaatagtgtagtgctcaaggcagactttttttttactaattaagctaaactattgtttggtttgtagaagactttagaggatagttttggtttaaagtttaaagattttctcagggtaatagttccaggggtttatctagcctcagtggcttcagaagtctgggttccatgagaatttgaaattttaaagcccacattccccccccttttgatcacagttcttccacagatagccaacaataaccaacaatagacggggctataaagtgaatgaacaataatacctgtgagaaatgtgctccatagaacagtcaaccgtaaagggcagcatttacgtaaaaacaaagttcagaaggcagggaggggcaggaaagatgggcgaatggaaacaagggaacccagggagaaagggggtagagtgctgtcacgttgaggggattgcaactaatgttatggaacaaaatgtgtataaattgtttaacgggaaatcaatctgctctgtaaacattcacccaaaccgcaataaaatgttcaaaaaaaaattcttctatagaatctttcatcaaaatgttcaccctttacccatctctatcttcttaatgttatcatccattctcttccttccagctaaaatgaacttgtatttatcctgtacctgccttgtgctttcaggcctccatgcctttgcttcagggcttcatatgggtttgttccagttaaagccattttacacttgatgaaaataaggaacagaaagactaagtgacttgcccaaggccacacagctggtaagcagtagttaggtctcctactgacagactgtctggttcaagaatccacatgcactcttaaccattatgtcatatccataatcagttgttcaggatatttttacagtattaaattccttctagacttctgtcttgggtgtaactcaaataaaaacagaagcagcacagcttgtagagtgatgattctcaaactttagcctgcatcagaatcacctggagggattgttaaaacacagattgcttagccgcacccctggcttctgattcagtagttctagggtggggcttgagaatttggagttctaataagctctggcattgagtgaataagttcctaggagatgctcatgctactgacttggggacccctggtgtactacatagaggttaagagcatgggctctggagttaggctgccaggatttgaatttcagctctgacggttactgtgaatttgtgcaagttcttgaacccttctgtgcttcagttttctcatctgtaagctggttatactgatagcacctacatcatagggtttttatgggtgtcgaatgaaataatatgagtgaagtgcttagtgcttagaactctgctcacctcatcctaagaatacagtgttatttaccataatgatgataagacgtggcttcttcctttgcagattttcgagtctacttgcgaagatgacttaagtctaaaaaataagaaacagtgtgaaatcagatattagtttatgtggttctgactctgaagtagcttagattcagaggggtgatgtgtgtgtgtgttggtggtggggggaccaggaggaggagaggtacatgggactagaagacatggaaagttgtatataagccaaaccaaatctgttgccatcgagtcgattctgactcatggcaactccatgtgttacagagtagtactgctccttagggctttcttggctgtaatctttacagaagcagatagccagccaggcctttctttcatggcgctgctgggtggctttgaactgccagcctttagggttagtagcaaactgcttgagccacccaggacctagacgatgattgaaagttatatgtaaaagtcactgttgagttgattccgattcatagtgaccctataggaccgagtagaactgccccatagggtttccaaggagtgactggtggatttgaactgctgaccttttgttagcaaccaagctcttaaccactgtgccaccagggctccagttatatgtagtcagggcttataaaggttgggaatatcattggtttttgtttttcaaccaaagaatttgaagcaaagagagggagagagagagagacttgtgctctgtttgccaaagagataactgactcctcttcccatttccctgtcttagagttggtatctggtctgcaggtgaagttcctggcagtgttcgccctttataaggaacgatagctaaggaagtgttttgctactggcttctaaagctgagctctgcagcctttatcctctacagctgcctcacatactcttgattcttgctgagaaaggcagttgttacgtttagaagtcttcagattccagagccagctggacagctgaccctctggtagctgttccccaagctgccagttctctgtcacctcatctccatgggccccttcttgactttgaagcagtcgtctgtactcagtgcactagccaaccaggggctggagagagcttaaggggggagtctctcccacttagatttctggatggatggaatatttgggcccaggaacaaggtgtattctgttcagaagctttaaccgcttcttcattgagtgtgtttaaatgacagcctacagcgttaagaatgcacctctagctcatgggtagggagcagtggttatttttgggtgtcctgaagaaaatatttgggggaaggagtggggagaagttcaggcagcgccatttatggttgagcaatgcttggtattctacagaagggaccatatggacagtgggggtgagtttagcattttggttgttcacctcttgctcccttcattcaggaatgattagagacacctcattagccatcagagtggaacaagtatttcctggacccacaagagtttcagccctgcatcctgggcgtcttctggtctcctagcctgctgagtcaccacctaggaattgcagtagacaggttgctgcctggagcacctgcagcgatgttggcatgatgcactgttgactggtattggtatcctagataccgcttgggcctctccaggcctgttggagctataggctggatcttagcttcccctccagcttgttccacaaggcgctgacctacttttcagggacaattaagtgtttgtgagcaaaggaaggcggtgacccgagtgaaggtgaaccagagctgcattaagcaaacatttggagttaactttttctgccccacacagcagggcccatctcatttcaaatggaatggcagaccaggctgatgtagtgccaaattccagatgcttatccagatagccaccaattctgagttcttattccttctgtcatggaaaccctggtggcgtagtgcttaaaagctatggctgctaaccaaaagatcgacagttcaaattcaccaggcactccttggaaactctatggggcagttctactctgtcttgtaaggtcgctataagttgaaagatggcaatgggtttttttttctttattccttctgtcagtgtaactttacctgtcataaacgctgtatcctttgtcttttaagtggtaggagaggtttggaagtaagttgaggctcttggagtgaatttatgagataagccatcagtcttttttggtggcagtgttctggctcttttgtagcctctctgaaaagattccagtctctttttctttttgtttcaggctggggtaatgggttggatgggagccagatctttaggggagtaagtagccactcttttaagtattcctgggttatattcagtctttgtccgcagtgaaagaaagtaatcccactttcccacccccaccattgatttcacctaccttattagcagaccccaacttctgctccctgttgagtgtaattattatgttctagttgttgtctttactaaggtcaccttatcactagaagaaggagccaaagccctgagaagaacagtgactgttgtcctacactggctcctctaagaccttgagggaattgccagactgcaattaggcagtttcttaaacttttatattcagcagctccacatacatgacaatgcccacaatctcccagttgataaaaagaaaagttactgatactgtgacccttgatccaggtcaaatcttaaagtgcaggaaggaaaacacttggaagaagaacatagtcccaccagtctctctttagaatttccctctgacaacctttgaggtgacagtccgtttgaggaactggtttatatattagagcatggcctggaagtcaggaagcatcaattttggttttgtaggtagctaagtttcttgcgaaagggtgtttgaggtggcctgaaattgctgtgctctcctcagaaatcccagagcctggtcacaaccccttacttctacttcttttctttcatgcccataaagcctgctctatgcctatttcccagtctttcagccccttctatggtgtcagtgccttccctgcctaccctgtacaataacacttgtacttccattctcagttctcttacatccttctacaccttcattccttccctttccatgtccatcttctccacctggctactgagtgctgctgcataacattgtgctgactgactattgtacagatttatgagctccagccacagcttggccctcaaccctgatgtgtagtcttttgttgtctcctggttgacttccattctttttccctacagcagctatttcagactttcaccactctcctcaaacttgctactccaccctaccttgtaattgctcaccaagtcatttatttagcctttgaatattcctacctttacctcttaatgtatctgtaatcttcaccagtccttacctcattccctcttgtgtcagaggcagacttctgggcgtgtatgtattttgtattcttagtctgtccttcctcagtgactctataaacatgttcagattttcttcatcttaaggaaaacaattcttgaagcttctctcttcttcaagctctctttgcttttttagcagtaaacttactgaatagcctttcttatattccactagacttctatgcttaccatctcaacggaagctgctttcacttgtgatgacctaattgcagaagtcagtagcttcttttcagttctcgtgcctttgaccttttaagagcgtttggcactattttggaccttttttccttccttcctctgtgtgctctccctggaagagtttacctactccagtgattttgtcaacttcaactctgtgtgcgatgatgactctccagtcagaatcgcaaagtaccatctttcccctgaagtccagacttgtatttccaaatgactatctctgtttccactttgaagtctactgaaattcgttgcagtctattgaaattcactaggatttagaatacatatccaaaactgagcatatcatcattccccctctataagctgctcaaacctgcttatcttcttacacagcctttctgagatgttgatgttaaccctccacctatttgcccaagttaggagatttctgtttttgtcttctctcattctccacacctgattggaccctaggttctgtgtcttctagcttagaaacacctccacatccatcctctcctggctagaaccactgccagtgccctattttagatccttatctttgacttgctccagtgatcatgccaccactcttcttaaaaattccagtgctcactgccacctgtccccttacagcgtaaagctcagacttctttgcatgagtatgattctcaatttcctcccttctttatgcagcctatggcctgggatgttctttctactttatctgcctaacaaacttccgttcatcctgtaaagtcatcttttgtcccagctcaaaagtaactgttttttttatgttgttctctcttctttccttctaccccaaccaggaaaaatttaacttaacttccccatctgagttctcatgctactttatacatcctttgtaatagcacttatcattttgttttacagttatctgtttaattgtttgcctctcctagaccatgagttcaatgagggcagactgtaccttctacattcttttttctttggtgctataacaattgcttgaattgttgggttgtatataaagtttctcctatctccagctaggagccctggtgtcatagtggttaagagctcagctgcttaccaaaaggtcggcagttcaaatccaccaagtactccttggacaccccgtgagggcagttctaccctgtctgtatggtcactatgagtcagaatcgacttgacggcaaagagtttggttttgttttttgctatctccagataaaggatgttcggaaaatctgaaagagctacattactgctggatattagtcatggtagattctcttctacactttttatttaacagaatatccttgtttattgtaggaaaattataaaataaatgaaataaaaagctaaaatcacctaaaatctcaccacttataggtaagtactgtaaacattttactgtttttttttttcttttagtattttcttctttaaatatatacatgtaaatacatagtttatcaaaatataccattcgtaacttgctttcttcacttactggatggtgaaactctttcagtataaatcataattatcataattaatattactgtcaatattctcttacatggcactgtacttcaaccagtcctctgttgttggacttttaggtaattttacattacttggtgttataagtaatgaggtggatatacttgtatatatatattttgcacacttaaccatttatttctttaatataaattcctaacaaaggaattgctgagtagccagtagctactgcacatttttaaaaactttagatacattttgccaaactactcttcataaaagttgtaccatgtggttgagtttttatacttcattgaggtttttttttttggtggttttgtgtagcttttatgtattggaatgatttaatttcggctgtgttttaggaagattgagccagcagcacatgtggtgtggattggatgaaacagagaaaaatcggttttttagaggctgttttagcagcccaggtgagaggtactaagcaccagaaaggagagagtgactgtggaaatagaaaggagaggcatttggaagaactgataggactttatagtgagttgggaaaaggatgatgccattaattgaagtgggaaattttttttaagggcattgatgttaggagcaaagataggaattcatttttaataacctgagttctagctgctggtggcctactcaggtggaaatgcccagcaggcagttggcactgcagaacagtcagaagagaggcaaggttcaggtgtctcagcctgagatttaaagccctccgtaactgccttgcccatgtcctttccaagtgctgcctcacacctaaaccagatgagactttttatccttctggaaggccttcctttactgggtctgctacacagactcttacccattgtttacaatccacctcaaagccctttaggaaaccttctgtgatcaccgcactggaagtttgttacctactttcctaaatgcagagggttattttttggggggagggtatcatttatatcgtttcttaacaccccaatttgtatatatgcattattttcttctacaaaattggaagctcctggagggtggggaatgtatcataaactcctttttaatctcctacattgccagctctgtattttatacttaaaaacaaacaaaaaagaaaaacaaaccggttgccttcgagttgattccaatgcatagcgaccctataggacagagtagaactgccccatagggtttccaaggagtggctagtagattcgaattgctgaccttttggttagcgtccaagctcttaaccagtatgccaccagggtttccattttgcgcttaagtgtccaaaaatatttggtgatttacagaacgaatggaagctgctttaatgtagtagtaataatgcatgggatcattattattctgtaccacagagtgctaacattttacgtgcattttctatgcatttatttattaatactcggatgtattatggcagagaagtggaaaatgagatgttaagtgagaatcccctttcacagccatattcccccccgccccgcccgattcttgagagtgtgcacctgtccttcagcttccagccacctccactctactaaaattgctgttgtcagggccactaattacctcctaattcccaaatccaacggtaatttttcagccctgatcttgcttgacctttctttggtacttgacattatttaacactgtgtcctccttaaaagcctcttgttccctaaccttttgtgacctcatcctctactgattttcttccttcctcatttacaggtttgtcttcctttaaaaccaaaaaacctgttgtcatagagttgattccagttcatagtgatcctgtaggacagagtggaactaccgataggattttcaaggctgtaaatcttttttttttctttttttaagttgtactttagatgaaggtttacggaacaaactagtttctcattgaacagttagtatacatgttgttttatgacattggttaacaaccccatgacatgtcaacactctcccttttcaaccttgggtttcctaataccagcttttctgtcccctcctgccttctaatccttgtcccagggctggtgtgcccctttagtctcattttgtttgatgggcctatccaatctttggctgaaaggtgaacctcaggagtgacttcattactgagctgaaagggtgtccaggggccataccctcagggtttcttcagtctctgtcaggccagcaagtctggtctttctttttgagttagaattttgttttatgtttttctccagctctgtccgggactctctgttgtgatccttgtcagagcagtcattggcggtagccgggcaccatctagttttcctggactcagtctgttggaggccatggtagatgtggcccattagtcctttggactgatctttcccttgtaaccaaggctgtaaattgttacaggagcagactgccacatctttctgccaccgagtggctggtgggttcaaactgccatccttctggttagtagttgagcacttaaccactgtgccaacagggctcctttatctgcctttacttgcctttcaataaaggtgctttctaggattttgtctttagcccgctacatatttttcttgggtgaccttattcatactgtggctttacctgctgtggtgactctgggccagatctctctcttgagctccagacacttctgaagactggaggacttcgttgggtatcgtatagatgtcttttactcaacatgttccaaatggaacctttttcaccttcaccctggcaaacctgcttttccctgccttctactcagtcatacaagcaagacatttggggatttttgagaatctttcctctcttggtccatccatctaccctacgtcaaataaaagtgatagaatatcataaaaatctgccacaaaaatcttatcccttctcttcttcccatctctgatactactattttcagttcagattctgttacttcccaacaaataacgaactgtagtcgtgtcctaactggcctccctcctttccatcttgctccccaccttttcactatggccagatgctctttgtaaaagtaaaatctggtcatatctatccctccccccaagcttaaatcctttcagcgactttcattgctgttagagtgaaatttgattttgttagtctggcatgcaaagccttcatgtcatgctgtcattctcccacatgtacccttccaccagccatatctattttgagctctttaaatgcattgtgtcctctcatgtttctactttgtttcctctatctgcaatgttcctgttcccatcaatctcgttctctctggcccttaagatcccagttcaactccttcgggaagccttctctaggtttccagcattcttcttttccatgctttggtacgcctttatcagcataagtaacattctgtaatgttgttggtttatttgtttgtttcctcactagattgtaagctgcttgagaaaagagactctgagctcttcatctccactctcagtgccctgcagatttggcattgtgtaggcaataaagtggtgcagacggttaatgtgctgggttgctgtctgaaaggttggaagttcaggtctacccataggtgccttgtaagaaaggtctggcaatggacttctgaaaaatcagccattgaaaatcatatgacacaaagttctgctctgatacacatgtggttgccatgaggtggaactgacttgccagcaactggtttggtttttaggcagtgaaaaaaaccttgttgagtgtatgaattgactgagtgagaagggtatgtggttagatgcagttctggggtcaggattcaaactccaaatttttgactcttagacttttatttattttttaataggtaataacattcacataattgaatattcaaaacaaaaatatacagacaaaaatctgtctcaacccagctgccctttttccctccctaaaggcagtgaatattatcatttttttgcatgtcctttgagagagaatatgtgcatttgttcattcaagaaattaattgagcaaatatttatcaagtgcctattatgtgccaggtactatcttaggcttagagaatataaacagtaaacaaaacagacaaaaatccctgccttcgtggatcctaaattctacatgtccttcttcctttaaaaaataaaataaaataaatgggaggatgacatacagtctgttgtacaccgtgctttgttttatttgaaggtgaatccattatcagcacataaaaagcttcattttttcctgccgattattcctctgcatggatgtaccatcatttatttaaccatttcaccactgatggacagttagagtgttgccagtcttttgctattacaaaatgaaaaaaccttgtcatatgctatcctttttcatctgtatatctttagaaaacagtcttagatggattgctgggtcaaaggtgtacatatttaaaaattggacggatggtgtcatccattgctctgattttttaaattttttgctatgaatattttaagcatatagacaagtacagataatattatagcagataacgtatgtatccactactcattgaccagatggtgacaccttcgttgaagttctgcctgttacatacttttagcacctctttaaccttgtgatggtctcccacaaaattttgtcttagaggcctagaaggcaggaggagacaggaaagctggtaatagggaacccagggtcgagaagggagagtgttgacatgtcatggggttgttaaccaatgtcataaaacaatttgtgtactgtttaatgagaagctagtttgttctataaaccttcatgtgaagtacaggaaaaaacattttgtcttggaatcaaaagtgataagattctcagaactcataccctaccatttgggagtcaccaccatatgtgctatctttggcttccttttttaatataacttcattgttaggaaaaagcagcttcagaggaaaattccattatggtatttttagtgtctgggatctgacttctcaaaaatgtttattttgtctccttcctctgctcagaaacaacaaagaatgctaccggaagttggtggcctgtgtttttagaaacttgtttgatttgctggtggaggggcccaggtgaattgagccagcaagcactttatttctcccagggttgtcaaataaccaaatgtggttcaccttagcaggcacctaccttagctggtgtcttctcttcctagtaacacaaataccacaagtgtgtgaatttcaagagtagaaatttattttcttttgattctggaggctaaaagtccaaatcagggtctcagcagtgtggatcccttccttatcagtagccccggccatttcttagttcccttggcttgtggatgatctttccatgtctttcttaccatgtgtgcctgtctctgtctaatctgctattttgtaactcagaagtgattagatttagcacaggctctactcaggtatgatctaattaatgtaacaaagaaaactctgtttctaaacaggattgtatttagagggataggggttaggattccactagtattttggaggacaaagtttttaatccataacagctggcttggaggtgcggctgtatctgccgagtactggtggaattgaatgagagaaactgttgttgtgggagatgttgatttctgttacagttggatgcttgtggctgtttcagtattctctggttgagataattcttgctgaaataactatctcactttggagatctgtaaacccattccaatggtaggtcactcttgtcttgatcttttccttaggtactcagaattcccagcagtgaggttttgaggttatttcatgattttactgactgagagtggaaccctagtctcaggtggggatagatcctaaggtaagagcagccatttgtgcctttcctcccaattgttccatgattcgtacattgtttggtcttatagtatcacataaccatcatagggaagagaggactcataggatttacccatttctccatggaccacacagctaaaaagaaaaggaccagggagagctgatttgagcgtctgtggccttaaagcacgaatcctttgtaagcttttgtcaggccctatagcaaattttttatagcaaaggtgtaattcacacgaaatacctccctaggcctgacttgagtacaggatgggcagaacattcttgtagcatagttgccagacctgaacttaactagttgccgttgagtcgactgtaactcatggcggccccatatgtgtcagagtagaactacaggtattggagttaggattccaacacatattttggggggacagagtttagctgtatctgctgggtactggtggagttgggttttcaatggctgatttttcagaagtagtagtttgtcagggcttttggttagctgagcacattaactgtttgcactactcagagactctgatgtgaacttagttctctttaaagcctctcttggccttgccatttcagtgttctccttctaagcttgaggcctgacttcttctgtcttctattcctcagcgctgcagaggcagctgtggccctggggacagccgtttcttcagatagtgaactcattttctttgagaccagaggaacaaggtgtaactcaacccctctctccattacacactgctgccagggggagaccatgaagaaagtgatctttgtcacttcctgaatagggccctgaacctggcatctgcttttgctactggcttttaagtcactggagaaatttttggtgtcttccttggtcagcaactgctttgcagtaacagtggcaactggctgtcaaggtgtcagttctgcctcaaagaaatttgaagtatttatgtgagggaagttaccttttgtgccctaaacctcttgtcttcaggctgtgtctggagagtgagcagctggaagtcagctgtacccttagttggcaatttgatgggcccatgacgtcatcttctctgaatctgaggagacagtgctgtttctttttcctcctgctttctcccattagactctgagctccgtgttcccagaacctaggtcaatgcatggtgcatgcaacaagtataaacccataaaccaaacctgttgccatggagtcaattccagctcatagtgaccctatgggacaaagtagaactgcccatagagtttccaaggagctcctggtggattcgaactgttaaccttttggttagcagcggtagctcttaatcattatgccaccagggtttccacaacaagtataaaaaaacccaagtataggtagactgaatgattgaatgaattccttattctggctgtccaggtttagttcactgaccgtgatggagtgacaccgatggagtgacctatgggaggaggaactttgcttcaaaggattgcttcaaagcagttatgggaggtgttgatttctagaggggttttggggttctctcttcattggcctagaactttctcttcagtggtaactctttgctctctgacttgccctactgtctctgaagtatcctgattctaactcagatgttcacttcccctgggctctggcccactctaggacagggcaagtattcctttttagcagtcatcctgagtcagaagccctaaggactacaccgcatgtactgtagtctggacttcctgatctgactgtgttcaatcaagttccactcagatcttaagtgtctgtgcttttgtaaaggctgttggagacagcagggcttttttcccccctttgtcagcagctggccggagtgcctaactggctgccagatcctgaagcctttcacatatttctgtccctgtctggaacttagggcagaatctctcttagcacctgaggttacatctcactattctccattgtagagcctactgaagaataaaagatgaacagtcatgaagaccatatagaggtgttggactacggtgctttgaaatgctctgattctggagaaaggtcgttgatttgcaagaatataaccagagtccagaccactgtccctcattccccaatccctcagcctcaagttagaaccatcactccataattccaaacatccttgtttgtgtttaatttttatctgataaaatattattaaacaattttaatggtgaaacactcaggagatgacaaacaagcatgtgttaacttcttaatgcgcttagttcaagtggctattttaaaagtcaattgttcctgctgttggattcctgttacccaggctgctttcctctttaggtgggaggagtctctggatagaattttagagccgccattaaagcaagaggacccagctcttctctggctgattgatcattcctttacatcttattcttttcagcacttattttcagattgcattgtattgctttcagatcatggcacagaagagatcttcgagataatttataattcgatggttctgtacctgtggctcactgacccccttctaactgtaaacaaatgtttgtatgtagataaatatgtggctctttctaggcagagtattcttagttttcaccagattctcactggggtttgtgacctcaaaaaaggtggttgttaggtgccatcgagtcggttctgactcatagtgaccctctgtacaacagaacaaaccactgctctgtcatacaccttcctcataatcatcgttatgcttaagcccattgttgcagacactgtgtcagtccatctcactgagggtcttcctctttttcgctgaccctctaccaagcatgatgcccttctcctgacaacatgtccaaagtatatgagatgtagtcttgccatccttgcttctaaggagcagtctggttgtacttcttccaagacaaatatgtttgttttttttggcagtccatggtatagtcgatattcctctccagtaccacaattcaaaggcgtcaattcttctttggtcttccttattcattgtccagctttcacatgcatatgatgcaattgacaataccatggcttgggtcaggcacaccttagtcttcaaagtgacatctttgctttcaacactttaaagaggtccttggcagcagatttgtccaacgcaatgtgtcttttgatttcttgactgctgcttccatggctgttgattgtgggtccaagtaaaatgaagtccttgacaacttcaatctttttctccgtttatcatgatgttgtttattggtccagctgtaaggattttcgttttctttatgttgagttgtaatccatactgaaggctggggtctttgatcttcatcagtaagtgtttcaagtcctctttactttcagcaagcaaggttgtgtcatctgcataacgcaggttgttaatgagtcttcctccaatcctgataccctattcttcatatagtccagcttctcagattatttccttagcgtacagattgaataggtatggtgaaaggatacaaccttgacacacaccttttccgactttacgcagtattccattgttctgtttgaatgactgcctcttgatctgtggttcctcatgagcacagttaagtgttctggaattcccattgtttgcaatgttatcaataatttgttatgatccacacagttgaatgcctttgcatagtcattaaaacacaggtaaacatctttctggtattctctgctttcagccaggatccatctgacatcagcagtggttttgcatcttcttctcaacgtggcttgaatttctggcagttccctgtccatatacagctgcagctgcttttgaatgatcttcaggaaaattttacatgtgtggtattaatgatgctgtttgatagttttctaatttggtgggataacctttcttgggaatagccataaatatagttctcttccagtcagttggccaggtagctgtcttccaaatttcttcgcatagatgagtaagcacttccattgctgtatccgttagttgaaacatctcagttgatagtacgtcaactcctggatccttgtttttcaccaataccttcagtgcagcttggacttcttctttcagtaccattggttcctgctcatatggtacctcctggaatggttgaacgtcaaccaattcttttaggtatagtgactctgtgtattccttccatcttctttggatgtttcctgtgccatttaatattttccccatggaatccttcagtattgcagcttgaggcttgaattttttcttcagttatttcagcttgagaaatgcagagcgtgttcttcccttttggttttccacctccaggtgtttgcacatgttgttataatactttactatgtcttctcgagccaccctttgaaatcttctgttcagctcttttacttcttcattttttcctttcactttagccactcgacattcaagagcaagtttcagagtcttttctgacatccattttggtcttttctgtctttctaatgatctcttgctttcttcgtgtataacgtccttgatgtcattccacaattcgtgtggtcttcgatcattagcgttccacgtgttgaatatattcttgagatggtctctaaattcaggtgggatatactcaaggttgtggactttttccagtttcttcagtttcaacttgaactttcatatgagcaattgatgatctattccacagtcagcccctgaccttgttctgactgatcatattgagcttttccattgtctcttcccacaaatgtagttgatttgattcctctgtattccatctggcaaggtccacatgtatagttgccatttatgttgttgaaaaaaggtatttgcaatgaagaagtccatggttttgcaaaattctatcatgctatttctggcattgtttatatcaccaaggccatattttccaaatattgatccttctcctttgtttccaactttggcattcctatctccagtaattatcaatgcatcctgatttcgtgttcagtcagtctcagactgcagaacttggtgaaaatcttcactttcttcatctttggccttagcagttggtgtgtaaatttgaataatagtcgtattaactggtcttccttgtaggcatatgggtattatcatatcggtgaacagcatagcacttcaggatagatcttgaagtgttctttttgacgatgaatgcaacgccattcctcttcaagttgtcattccaggcatagtagaccatatgattgtctgattgaaaatggccagtatcagtccatttcagctcactaatgcctagaatattgatgtttatgtgttccatttcatttttgatgactccccattcctagattcatacttcatacgttccacgttcagattattattggatgttcgcacctgtttcttcttattttgagttgtgccacatcagcaaatagaggtcccaaaagcatgactccatccacatcattaaggtcagttctactttgaggaggcagctcttccaacagtcatcttttgagtgccttctaacctgaggagctcattttcggcactgtatcaaacaatgttctgctgctattcataaagttttcactggctaaatcttttcagaagtagactgttgggtccttctttctggtctgtcttagtctgaaaactcagctgaaacctgtctgccatgggtgaccctgctggtatttgaataccagtggcatggctttcagcatcacagcaacgtgcaagcccccacagcacaacaaactgatagacatgtgggggcagaaaaggttaagtggtagcattttgtaggaagctggggcctctgctcacaaaactagttagtggcaaagttgaatcttgaggtagattttggaattcaggtgtttttactctataaacaaagttctttccattatactgtattattcatactctttctggagaagtaagtggactaacttcaggaagatagacacatgtgacccaaactctctctttttttttaagtaatattttactgtgttttcagtgaaagtttacatagcaaattaggttcctatttgacaatttttacacaaattattcagtaacgttagctaaatttttcacagtgtatcaacattctctttaattgtgttctggttgttctatttccaatactctagtttctctgccccccctttcttctcatctttgctttacagtaattgttgaccttttggaaaccctgctggtggtatagtgattaagagctacagctgctaaccaaaagatcagtagttcgaatccaccaggtgctcctcggaaactctatggggcagttctcctctgtcctgtagtgtcactttgagtcagaatctactcgaaggcaataggtttggttgacctttttgtctcctgtagatggtttttttactagaccgccatactcacaggttgttgttcttaggtgtcatcaagtcagttctgattcatagtgatgatatgtacaacagaatgaaacactcctcggtcttgtgccatcctcacagtcattgctatgtttgagctcattgttgcagccactgtgtcagttcatctctttgagggtcttcgtctttttcactgatacccttctccagggactagtccctcctaaaaatatgtccaaagtaagcaagacagagtctcactatccttgcttctaaggaacattcttgctgtacttcttccaagacagatgtgttcattcttctggcagtccgtggtatattcagtattcttcaccaacatcacaattcaaagtcatcagttcttcagttttccttattcattgtctagctttcgtgtgtatatgaggcagttgaaaatatcgtggcttgggtcagactcaccttagtcctcaaagtgatatctttgcttttcaacatgttcaagagggcttttacagcagatttgcccaatgcaatatgtcatttgatttcttgactgctgcttctgtgggcattgattgtggatccaagtaaaatgaaatccttgacaacttcagtcttttctctgtttatcatgatgtggcttattggtccagttgtgaggatttttgttttcttatgttgaggtataatccatactgaaggctgtagtctttagtcttcatcagtaagtacttcaaatcctcctggctttcagcaagattgtgtcatctgcataacgtgggtcgttaatgagtcttccaccaatcctgatgccacgttcttcttcatatagtccagcttctcaggatatttgctcagcatacagattgagtaagtatggtgaaaggatacagccctggcacacacctttcctgatttgaaaacacacagtatacccttgttgtgttctcttggtctatgtacaggctccttgtgagcacacttaagtgttctggaattcccattgtttgcgatgttatccatcatttgttatgattcacatagttgaatgcctttgcatagttattaaaacacaggtgaacatctttctggtattctctgcttttagccaggatccatatgacatcaccaatgatatccctggttccatgtcctcttctgaatctggcttgaatttctgggtgttctctgtcaatgtactgctgtagccacttttcaattgtcttcaacaaaattttacttgcatgtgatattaatgatattgttcgataatttccccattctgttggatcaccttcctttgtaatgggcacaaatatggatctcttccagtcagttggccaggtagctgtcttccatatttcttagcacagacaagtgagtacctccagcactgcatccatttgttgaaacatctcagttggtattctttcagttcttagagccttgttttttgccagtgtcttcagtgaagcttggacttcttccttcagtaccactggttcttggtcatatgctacctcctgaaatggttgattgtcgaccaattcttcttggtacagtgactctgtgtattccttccatcttctttttttttttggctttaacaaagagatgtttattctctcacagttgaataggctacaagtccaaattcagggcgtcagccccaggggaatgctttctctgtcggctctgcaggaaggcccttgtaatgtatcagtcttccctcggtctgggagcatctcagcgcaggaacctcagttccaaaggacacgctgtgctcctggtgctgctttcgtggtggtgtaagactcccccgcttccgtcttcttttgatgcttcccacgttgttcagtattttgcctacagaatccttcagaatggcaacctgaggcctgaattttttcttcagttctttcagcttgagaaataccaaacgtgttctcctgttttggttttctgtctacaggtgtttgcgtatttgatacaatactgctcaagtcgccctttcaaatcttctctttacttcattatattttccattcgatttagctactctacattcaggagcaagtttcagagtctcttctgacatccattttggtctttttttttttttttcctatctttttaatgacctttttgctttgttcatgtatgatgtcctcccacaactcatctagtctttggtcattagtgttctttggtcattagtattcttgagatggcctccaaattcaggtggaatatactgaaggttgtattttggttctagtggacttgcttcagttatctttagtttcaacttaaacttgcatatgagctattgatagtctgctctgcagttggcccccggccttgttctgaccgatgatgttgaacttctccatcttctgtttccatagatgtagtctatttgattcctgtgttttcgtccggtgaggtccacatgtacagtcactgtttatgttgttgaaaaaaggtatttgcagtggataagtcgttggtcttgcaaaattttgtcatgtgatccctggcatcgtttatatcactgaggcctcagtttccaactataaatcattcttgtttccaactttcacattctaatcaccagtaattatcaatgcatcttgattgtatgtttgatcaattttaggctgcagaagctggtaaaaatcatgaagttcctcatctcacgggtaatatcctttatctcataggtaatattctttattttgtgtgccaatctgctgaactattttttaataagtatcttggtaacacctgcctttctcaaaggccataatcttatttctcaaatgaagaatctgaagctctatgaggcaaatcatgtagctagcctgttagactaggtgacctcagagatactgtgattctaacagtagtgtatattagaatgtgtatttatcttttttaaccatacccaactgtctagtttatgattttcaagtgtcacactcctttttaatctatttatcttgcccattaaattgttctttgggaaaggttcaatagaaccatgtactcgtgtcccccataatcctaatactcagatctgcgcaaagtggctggctgtacttgtggtcctgttgactgtaccagaaggcataagagctcggaaggcataagagcttgggttggttattttttattattgttccctctatattgttttagcagccgtcaaaattatttagcttgatcttttcgagtgagcatacatccttttctcttagttttcacaatgctagttatacagtttctctacctgcatccagcttgcataattgggagttttgtaaaacattatatttggtacagtatgagttctaccctaggtcactgagctgcgtcctgcacgccagtttgctctgaataactttggacctagggtctctcttaggaggacttggtctagtggggtttgacttggttggttgcttatgagtttctagtatgcaagggcatttatcgaaagagaggcaagagtactaagcccagatttgagaaacgtaggttgtttcccttactgtctcattgcttgatgtgtgacttttggacagattacttaacctctgtctgttttctcatctgtacatggaaaattatagttattttcataaaagcattttcaaagatgtgtataataatacagatgagccactttgagctccttacaacaaaggtgctgtagaaatttcagggttttttcccccaattataatctgtgtagtttatcctaagagcctatgactattgggaggtcatctttttgaggcaactggaatagaaaatttgcagaggatcattaagacaacccaaacagaaatcagcagagtgaaatagtgtcccagagtgggggacatgtgggtgatgtctaggatgcattttctccgttggtatctatggagaaagtcctgccttcctgaactgtacttctggcacttagggggtggacttaacagtttctccttttctctccctgccttggtctgtgttaatatgcagtgtctcctttgtaatgtggctgtatttcaatctataaacatgattgctgtaaggagagtgtagagttggttgtttattttgtaaaacctatcccattgccctgtgatatttgcctaagagctcctgttgtggtgacatccttatggtgagcatggccctttaaaagtttcgttctcagatgttagctgagcccctaactggtgtcccggaaagcatttaagcctctctccccagagtttaagcaagaggagcagtaatcccagtggagcttgggctggggtctagagaaaaggtggcagatgatgggcagaggctgttgtggtctcatggcccatttgcacaaaggagggactggcctctcctggggaggtatttccgcttaccgcaacaaatgagagagcacaaatgtaatgaggtttctctggtgacatcacttgtaaatgtaggcaaagtccagttcttgggggctagctgaagagggagtagagatcagtcggtttgcatgctctcacttctcagctgtcactgcgccatggagcctatttccagccactaaaccaacacagctgggccaggacatgaacgcttacaagtatcagaagttcctggagggactcaacaaccttagaggtattaaaaggcttcaggctccctgcttttatccttgctaattgtgtgaacacttactgtgttgtgtgttgcgtagggtctttacttttcattgacccttaagggcttagaaagccctcctacttcgagatggccatattttttgtgtttagataattacacagagggatagagtttataaatgtgatcatgggtaagtaggagagactccctcaagtactgcagcagcagcctgttctcttgcttgaatgggccactaagaaatgcctcctgctctcctgagctcagcaggactcagtgcactcctcattttctttgaggtagctaggcagtgtgggtagagggttcttgccaccgggctctacagcctcacctaggagaagctaggtttcttgggctgggttttccagttgtctgtgtctacattgagtcagagtcccatctggagagaacagggagtcaggagaaagtgggggaaggggaggcggggtgagaatgcaggctgacaggctatagatccctttgcaaagagtaaatcaataactttaaaggagtgtgaactttttagtaaaatagtattttaaaggaaagatgttttttgcattgttgtcaaacgcttcactgatcatagatgagaagaatgcactcatatatgactatgcaggactctttttggctattaaggatgaaaatgaattaaatatatattttttacttcccttcctgtaaatgttcggtggttttatttccatctgttcaaaccattcctctctcatcagcagtcaggattctggacccagagcagtcatgaggtatgaagagagcgggaggaggtagaaggaggaaagggataaaatgggcttctgcacggttgagggaaggagcaaacagggcatgaacatgagatctggactcccttcctgccagggcacgtagatattttactccatttcaccatttgttaaaagaacagctgtgagaacatctatatgaagcgcttctaagagaacatacatatgaagagcattgtgtgctcaaaaggaatatacagctataaaatattgtattgatctctgtcgtctctcctgttccattgtatataatctccctgctccccgccaccccgtaacttgtgacagctggagccattcccttttaggtttagggatctgcaagctcatcatgtatcagacaagtcttagcaggaatgagagacattaactattgctccaacttccctatcaaagggagttttgaaagggcagaaatggcctgggcttcttcatccagactcatggaggagagatgggaggaaagagggaaggaatagggatgctggtcagcaacttttccagtcttcagccttgttggggactgggagagaggaggggctcttgtcccatacaagagcccccttttcttgccctatttcatgtcttagagggatctttctatattcctggccatgaagtccacccaacagcaggagcctttttcttcctttttataaaactcttggcaagattattaaacttaattaaactgcatatctttcaatagtggaaaaggctcagagtatgactcccgtatctctccttggacactgagattcttagtgtagctttactcttttttatccttagcttcatccttctcataaaagctgccaaggttttctgaagatggacaggtggtggatgaaaactgtaggacagttggatgaccagttaaccatactaggatggccaagacctgtgtaaatcaggtttatgcgtgctccaagtagatttcctgaggttctcaggagaccacaccactcatgttaccactctatcactctgctgtatatacttcaggagaaaggtgcaggtatgactagtagtgggggcccttcttgttttccttttgtgtaacttgagtggaggaaggagttcttttttattccctaaataagtgttgttttggatcccagttttccctcactcttctgactttttaagtggggctaatggaacaaggaaaaaaaggcctggtgatctacttccaaaaatcagcctgtgaaaaccctgtggatcacaatagtcccatcctcaaccaattacggggatggttcagagccaggcagcatttcattctgttgtgcatgggatcaccatcagttaggggccaacgtgagggcagctaacaacaacaatggaacaagcagttcttggtttgagcctctcaggggtgtagtcgttttaaattgcaacctagggagggttgtttctacttttggaagagattgtattaaaatcagcctggcagtcatttgttttgtcagcccatctatagtacttgttttttccttcctttgcccagcctgcaactattgctaggaatgaatgagcaatagactggatgtacctatcatggggagtgccctgtatcgaactgaaatcagagaagagaaacaaccacagcagcccccactccactctccccacttcagacactgggaccatgctgttttggatctacacctttaaagaggactcagaagcccttgttattgtgagcgttgaataagaggatatgtatacttagttcagtgcctggtacatggttggaattcatcaaatgttagttctacctcttattgttcattccctgctcagacttccttgagtcacagtgaatcattgtgtgggttctttggtctggacttggaggatgagctggaccaggacacactgtttgagagttatagcaccagtcgcccatctacatgtttggcttctagtcttacttgatctcaatgtaggatagttggaatgattgagcctggaagacagcagggctagtggtaatagttataatgataagtgttcagtaaatgctaattatgtagcaggcactgtcctaagcattttacgtgtattagtccatgtagcccttataacaaccctgtgaagtaggtagttttcagcgcttggctggcctgaactcctttaaagaacagggtttatctgttgtgctgaggagataacagtgcctaggagagtattagctgagatggctaatgttactgtgcagctttctgatgctggtgaccatgtgcagtaggtaagagtatcaacatctgactgtgtatgtaaaagtacacttgggcacttgcctctgagggagagcagagtatggtgctttggagtgagggcagagatcttttttctccatactatgtgtcctgttttctgatccttcattcacagttattcacttctttttcattgttataagtctttaatggtgtaaagcatatactgcagtttctcttgttcaccaaaagaaagtatcagattcaactccccttcactcccggaacctgggtctttcatgttggagaggcttctgaaagagggcatgtagttgttttggtttagtcttaataatcatttctgaaatagttgttatacgtcttagacaagtaagtattcccccaaccttgggctgccaggcgacaaattagctacaacccattgcttttgtcaagccctcctgtgggttgagttccactgtgtcccctgattatggtgaataactacttcccttcttcatttcaccttatctttatacattacagagggactggcagcgataattggctcccctcttcatctgttgttacagtcatcccttggtgttcaccgggaattggttccaggacccctctcgaataccaaaatccacggacactcaagtccattttataaaatagtgtagtatttgcatataacctatgcatatcttcccgtatactttaaatcatctctagattacttataatttctaatacaatgtaaatgctatgtaaatagttgttaatgcttacacttaacatttaatgcattctcagtctttttaaggactttatcacaaaccagagagaccatttttgctgttgcaggggcagcattaacatgtccgcgaatttcagcttcttctgctttatcgtgccaagggtttattcattcttactgaccttatggcccacttcagcaagtaactagggccacgtttcaaaagatctaagattttaattttcttgtcgagaggtagcactttatgcttcctctcagcctttgagggattgctttttaggagccattttttcatagaaacaaagggtacgtacagcacaagtagtgaacgaaggagaagtgaggctaacgatgctcaaacaatgagtgctggaaagagactgaggaggctacagctgggtatgcctacacagcacttcatttgtgtggattcagcgtaaccctaaaaaaaaaccctaggtgtggcaaattcaaatcttgctttttggaacttttttttctcccccatattttcgatctgtggttggttgactctgtggatgtggagcccacggatacggccggcctgcctattgttagttaccattgagtcacgtctgactgatggtaaccccatgtacaacagaatgaaatgttgccccgtcttgtgccatcttcacaattgttggtgtgctcgaaagtccactgttaaggtcactgtgttttttgagtgccatccaacctgggaggcacatcttccacactatattggacagtattctgttgtgatccctaggctcttcattggctaattctcagaattagattatcagacctttcttcctagtctgtcttaggctggaatctctactgaaacctgtccaccatcagtgacctgctggtgtctgaagtcccagtgggatagcttccagtaacatagcaacacacaagccaccacagtacaacaaactgacagatgggtggtggcgttttcatttagttactgacttttgtttttcctgacacggttcagctttcagcctttcctccatctggtgcgtaactgttgaagggagcccagtggaaacattgtagaagtttcttgaagttccggtccccgatttcctgtgaatatttggtgctttgacaccaggattcgggtacagtataatttattggctactgtttcttctggaaggctttaacttatatttcccaagcctgcccaaaactatagctgttgaggtgatttctgcccaggtggacctctcctgtgagtttttacaggttgaactgctggcccaagtcctgctcttcgtcagagtctagaccagtgcagtgattggtaattggaagttaattagggaggcagagataggtgaggtagaatgatgagaaagtggtcctctagcctttgctaagaaaatttgtgatagaactgtcaggtaatgaatgttttttttttttaagaaacatatcccaaacatattttcacctttctgtttctttgcatatactgtactatatttcctctgcctagagtactgttatatttttttccttgtagaaaacttgtactcacctgtcagtgcctagctcaaatctcacttacccctatcattgtgtatatgtgtgtgtatgtgttttctaagtagaatttttctctctccctcgtctgtgttgccgtagcactttaaatgtacttatttttaggacatggcacattatattatggttatttcattaaatatttggttttcctgctagtctttactttttgggcaagcttcctttaatttctgtaaatctcagcctcctcatgtgtaaaatgaggatgataatagaactctcctcataagacgttttaattaaatgagatagtgaatatgacatctggcacagagtaaaagcccactaaccaaaaccaaaccaaacctgttgccgtcaagtcgacttcgactcatagcgaccctgtaggacaaagtttccaaggagtgcctggtagatttgaactgctgaccttttcttttggttatcaaccatagcacgtaagcatcacaccaccagggtttccaaaagtccaatagatgttgttaaaggtgacgattgtgtcctatttattctcgtatctccttcacctagcatagtgcttggcacatattaagcaaaaaataaaacacttcaagaattgagttgaactaaactcatgtatccagatgtccttcagtagtcaccataggaagtgaaaaaatattctgtagatggtgcctacgctataaccattaataggattctctttgtagtttttcttttcagtgccagattatgacccgcataagaaactccacagccattttatagtcacatctaattttgggtcaaaaaaatattacccaagactttgacggtttttaaaaattaaatccaatctcaaagaatgaaaatatactgctactgaacacactgaaaaaatgatacagctagtctatcccaaaaccccaaacccactgccttcgagtcagttacaactcatagtgaccccatagggttttcaaggctgtacatctctacggaagaatctgctggtggtttctaactgccagcctttcagttagcagttagttggtcactttaaccgctataccaccagggttccttactagtctatagggatttccaaatgagagcttccagataaagtttggacagcggcaacactgttcaataagtgagcaaggtgactgacctctgagaaggagcacacttttttttttttggttctgttagttctgatatgtttgttaaataacctttctcattatcttaaagctttactttggacatccacttagtctgccagcttagaagccctgtccactgttgccaagtctgggcaagcaggacaagcccatacagctttttacatgcccctcggagaatggcctttttgaacggacttttttcttctcttcaaggtgcctcataaagaacttagatttttagattcttagaatctcagaaacttagatgtttctttctgatgttaaatagatctactatctttatagaaaatatagaaaaacaaacaaaaaattgcctaaatcatacaattcacagattaccatgctatatcattttgttgtatttccttttagtctctttctatccatatatatagaatgttctgtttttaatatatttgttattattgtaactttaaaaaaaatttattgtgctttaagtaaaagtttacaatttaagtcagtctctcatacaaatttatatacaccttgttgtgtactcctagttgccctccccctgtactccccgtgtctgttcagccagcttctgtccccctctgccctctcatctcccctccagacaggagctgcccacatagtcttgtgtgtctacttgagccaagaagctgattcttcaccagtatcattttctatctttatagtccagtccaatccctgtctgaagagttggctttgggaatggttccagtcttgggctaaaagaaggtctggggaccatgatctccagggtccttctagtctcggtcggatcattaagcctggtctttctacaagaatttgaggtctgcatcctactgctctcctgctccatcagggattctctgttgtgttccctgtcagggcagtcgtcggttgtagccaggcaccatctagttcttctggtctcgggctgatgtactctgtgatttctgtagccctttctgtctcttgggtttgtagttaccttatgtctttggtgttcttcattctcctttgctccaagtgagttgagaccagttgatgcatcttagatggctgcttgctagtgtttaagacctcagacaccactcaccaaagtgggatgcagaatgtttccttcatagattttattatgccagttgacctagatgttccctgaaaccatggtccccagatcgccacccctcccactctggccttcgaagcatttggtttattcaggaaacttctttgcttttggtttagtctagttgtgtatagctctatatcttgctgcatattattttgtgatcattttttcatgcttttagctgtttgtctaccaaaaccattgccattgagtccattctgactcatagtgaccccgtagggtttccagcctgttaatctctacgaagaagattgccccatctttctcctatagaggggctggtggtttcgaactgctgacctttctgttaactgtcggtcattttaaccattgtgttaccatagctcctctatttgtctacaacatcatgttttaacaactgtgtagaattctgtgaaaatggaaggataattgtatttaacattccttaattgtaggccacgtgtatttctaatttttcaccactataggaaaccctggcggcgtagtggttaagtgctacggctgctaaccaaaaggtcagcagtttgaatccatcaggcgctccttggaaactccctggggcagttctactctgtcgtatagggttgctatgggttggagtcaactcgacggcaacaggtttggttttttttggtatatatatatatataatatgacagatgaggacaatggcagaattctcaagttctgtgcaggagacccatgtttgatgcctggccagtgtgcctcatgtgcagccactgcccattcattagtggaggcttgtgtgttgctctaatgctgagcgggtttcagcagagcttccagactaagacaggctaagaagaaagccctggcaatctaattccaaaagccagtcagtgaaaaccctgtggatcacaacagtcagatccacaaccaatcatcaggatggtgcaggactgggcagtattttgttccattgtgcatggggttaccatgagttgggagagatttgatggcagctaacaacataatatggtaatgaaaatctttataaataagtttttattagtatctttgattttttttttaggatcagtttctcaaagtggaattactaggtcttaatcatattttattaatcatattttctaaggaatcctggtggcacagtggttaaagcactcggctgccaaccaaaaggttggtggcttgaacccaccagctgctctgcagggaaagatgtggcagtctgcttccataaagatttacagccttggaaaccctatggggcagctgtactctgtccttttgggtcactatgagttggaatcaatttgacggcagtgggttggtttttttttttttaattgtgttttcaaagctctggatgctgtttcttaaatttatttaacttttaaaaggtaagaagagggtacctgtaacattctgaatacccctctgatatctcttgggtcctcaccctctatggatagccgtgtcttcaggcttagtggccagctggctcaaatattttattatccagttaatttcatcttgggacaggtgctaagtgtctttctcacttagtcagcagctcccacatgtcaccatcacatcactgtgctgttgtactcagaagctttctcccaggagctctaggcgtttaaatagcttcattgatcctcccagccctagtaccttttcttttgtactggggagagatccataaatgctgattgggaaactgcagtaccatgaatgatctaatcaataatcaatactatatagaaatctcacattggaaccccagattggtactaggttgagcccccccccccccccgctgtttctgagatagcatctacctgtgaattgggccagcgtaacctgacataatagtttgacaaactgtccttgctgttgtcagtatccttgctggtgctgtgttgtaaatcaacatgttgccgtcaagtccaaatcagtttctgttacttagaacctacagtcctagaggcgaaaaatggacttgatgagagtacaaacacaagcttgtttctcttttgaaattgactttctagaggagataatgtgggattttctagttgatgatagactagggtcatttggggattagcctgaggagtgagagaaggaaggcacatgtgaaggactttgtgtgctgggggtcaataagaaagtcataggagccaggatggtggaaaatggtttgagtcaagataccagaattacatcctgcgtagtgagaactgtctgcccctcccattcccagagcccttaagcaaacctgtcacaatggggtgattctctccattgcaaggaatctaggagtctacatgcttctagggtgaggctagtcaacaccttttatagcactaggcacctagtagacccttgtttagatggttgacagctttgtactgttaaagtttatccctgtcttgattgtatattttccaggcttgttgcacgttactgggctagagaggagcatcagcacaagttgatgtggaggttggtttctattgctgctggtaataaattgattttcattacagctggagaggggttatgatgctgtccttctttctcagagtaagcctacatagctaactaaatgtgaattattattttcccccattcttgatcttatgtccttttgaagtaggtattaataaaaagagaaaaaaaaattttttttttattaacattaaaagattaagactcttccttgtctgtactgttctgccgcagttttttttggtgactcccctggagaaatcccaagctaataattctgattgtatatcttaatcatcacaactgtggagatggtcactctaaatgaatgttgctgttgttgttagctgctgtcgagcagcccctgactcatggcagccccatgcaccatgaaacaaaatgctgcttgtcatgcgcattcccccatgatcgggtgcagatcggactgttgtggtgcgtagggtttttattggctggttttcggaagtaaatcatcaggcctttcttcctactccattttagtctggaagctccactgaaacctgtttagcatcatagcgacatgcaagcctccactgacagactgatggtggctgtgcacaaggtgcgttggctgggaatcaaacccaggtctcccacatggaaggtgagaatctatcagtgaactaccatagggccccccaccccagaatgaataccaaaccaaaaccattgtggtcgagttgattccgactcagaacaaccccatgtgacaaagtagaactgccccagagggtttccaaggctgtaatctttatggaatcagactgccacatctttctcctgcagagtggctggtgggtttgaaccacaggccttttggttagcagctgagtgcttaatcactgtcccacccgggctcctaacctctaaatgaataataataataataaaaaatgaataccagttgttaaatagtaccttttgttcattgtggagtgacagagccctattcgacttcctagcttgatttatcttgaaaatcctgtcatttggaagatcactttttacagtctcttgtcaactaactgcttcactccctgataatgttccattcttgctgtatcttttactggaagtccccaccacctccttccttccgttcattgagaatcctctatataccagaccctgcacaaggcactggggataccaagattaatggcagtccttgtcctcaaggggattgttagtcctatatcagtctagtggggagacagaaacatgcacacgcgcgcgcgtgcgcacgcacacacacacacgcacaagcatgtggcagatgctgttacagaaatatgaaccaagtgttgtgagagctgaactgtggtgtagtgaatgctaagggcaatgtgggtgactgggaaagctttgcggtggagttggtattggagttgaatcttgaataaagggtgggtgggagtttgccagttaagaagggagaagaaggtttctgggaagagaacaggttgtgcagaggaacagactcacaaaaggctctgtttcctctggggtagaatgagaagtattactcacgtaggaagctgggaagaatgagtatgtgtgcattgttgtatagggtgagagatgaggctggaatagaaagttgagtctgttatataggactaaggaataatgtaggaggtagagggcaatagacattttaaggcagaggagtgacaaaaaaatcatgactttttttgggtgggtacgatagtggctagtataactggcagcaatatgaaaggtcatctatagttaggtgggacggcagctaaaccggtaagtgtgtacctgatattagtttgtctaggctaaagaaggatgagagaagacatagagaatctgcacatgaaatccttctaaatgagtttggtttttagaaacatacagattttatgttgagctatggatggaagtagagatccactttaccaccacagctcaagttgaacctgaccgttacgttgagcaatgctttttgtctgagttggtattttttgggacttgttagatgatgcactttagcatgaagcccacagagcagctggaaaccagactgcccaaggtgtctgtcagtgataagagggagagaagacccctgttttggccctgggtagttagtgcttctgtttctctgaaattgtctgggctgctgtacctggcccagggattcatgtttacataattctttatgatggatttggagtgctggcatttgacactgttgattacattcctccctatttaaatattctcttccttagggcatttcttgttttttcttcacttgtctgattgctgttcttctgcctttgatgggtcttttcctccttctgcctctaaatatggaaatttcttaaggggcaaggcagcatggcagagtgggaagaaaatgagctttggatccagtcaggattgggttcaaatctaagctgcatttaccagctcagtgacctgggacaagttactaaccttctctgagcctcagttttctcatctgtaaaatgaggataataatatcttacacaaaagtaatgaggattaaatggaatgggatagaaagttcctaacagcacataaatacatgatacaagcatagctggcattatgattgtgctgctcctaaccttcttttctctactcagtttttctggcttttatttatttattttatctttttatttattgtgctttaagtgaaagtttacaaatcaaatcagtctctctgacaaaaacttatacacaccttgctatgtactcctagctgctctcccgctaatgagagcacacttctcctctccaccctgtattccccatatccattcaaccagctcctgtccccctctgccttctcatcttgcctccagacaggagctgcccacatagtctcatgtgtctacttgagccaagaagctcactcctcaccagtatcattttctgtcttatagtccagttctggcttttcttttaaattgcgtactcttgtatctgtcttttcttaaaagtacttagaagtctctcagttttttagtctcttttttcatgtgtctgtgggacttctataactggacatcacatccaactcagtatttcaaaaccaagccttgcattggctttccttccttttcctatttttgacagttgtgctcacattcttccagtctctgaggtcagaaaccctggagatatctttgactgttttctcttcatcaacccctgctttcaatctgtcatcaagttcttttgtttcttcttcagaatttctcttaaattggccctttcctccccattccctttgccatgactctagtccagtcactcatcacctcacgcctgaattactgcaactgcctcacagttgttccttatgttctgcttccccttctagttcacactaccaaatacttgctaatatttcctgttacctgaagtttaagcatttttttttttaaagacctcttatgctctgatcatatcctacttatctagacttatttcactaatttcctagaacacactttcagctctaggcaaatccatctctttatcctgccctaaagtacctcatccattcccttctctttgccttttctcatgcagttctctttacctcgagtgcccttgttctttatacttaactgatacctattccttcaagcctcactccaggtctttctttcccaggagaatatctgtgattatcatagcctaccttgatgtatcactttcccacactctgattttgtcgccatgttgaaattgtaagctttttgaggtgagggcctgttttatagaagttatccttctgtaactgtcctggtatctggctccttactgagcacttgtaaggtgtggttaccaaagtgaatcattctttcttttgacaatttatgtatgatcacctaccatgtgtaaagtgctctcttgggcactgggacccagcagtaaacagcacagtaatgagactggttatactgtacacaagccgatgctagacaaatatttgttggttgactgaatcagaggaaaccagttgttgttaggtgccattgagttgcttccgactcacagtggccctgtgtacaacagaatggaaacactgcctggtcctgtgccatcctcacaatggttggagcccattgttgcagtcactgtgtcaatcgatcttgttgggggtcttcctctttttcactgaccctcagctttgtcaagcatgatgtcctcctccaggaactgggccctcctgataatgtgtccaaagtacgtgacatgaagtctcaccatcctggcttctaaggagcactctcgctgtacttcttccaagacagttttgttcattctcctggcagtccatgttatattcaatattctttgccaataccataattcaaaggcgtcaattcttctttggtcttccttattcattgtccagtttttgcatgcatatgaggcaattaaaaacaccatggcttagatcaggcacaccttagttctcaaaatgacatctttgctttttaatactttacagaggtcttttgtaacagatttgcttaacgtaatacgtcatttgatttcttgagtgctgcttccatgggcgttgattgtggatccaagtaaaatgaaatccttgacaacttcattattttctccgtttatcatgatgttgcttgttggtccagttgtgaggatttttgttttctttatgttgaggttaatccatactgaagactgtagtctttgaccttcatcagtaagtgcttcaaatctttttcacttttcagcaagcaaggttgtgtcatctgcgtattgcaggtagttaatgaatcttcccccaaacctgaggtttcattcttcttcatgtagtccagcttctcggattatttgctcagcatacaggctgaataagtatggtgaaaggatacaaccctggcgcacatctttcctgattttaacccacgcagtatcctcttgttctgttccaacaactccttctaggtctatgtacaggttctgcataagtataattaagttttctggaattctctcattcttcgcaatgttatccataatttgttatgttccacacagttgaatgcctttgcatagtcaataaaatacaggtagacaactttctggtattctctgcttttcagctataatccatcttatgttagcaatgatatcccttgttcctcatcctcttctgaatcgggcttgatttctggcagttccctgttgatgtactgttgtaactgtttttgaattatcttcagcaaaaatttacttgtgtgtggtattaataatgttgctcgataatttccgcattccactgggtcacttttctttgaaataggcatgtatatggatctcttctagttggttggccaggtcgctgtctcccagatttcttggcatagatgagtgagcgcttccagtgttgcatccatttgttgaaacatctcaattcctggacccttgtttttcaccagtaccttccatgtagcttggacttcttcctaaaggaagacaaatgacaagaagagggagatcttagaaaataaggcagagatgaaacaactattgtaggaaaaaggcatttaattgattcattcaggaaataatttattgaatatccactgataccagtgtattcctggtgttagggatttaccggagaagaagacaaagtcccttcccttgtagaccttacattttagcatttacaggtattttaaaaatgaaaagcacttaatattgggtgaagcccacctgtagaaggccagcagtgaaggagttaatatgcttgtggggctcttgctttgttgagacagatggtttctctgccccagggagtatttttaagggggattagagagctgggctgaggaaagcctgagacctctcttcctcaccccatagcacgcacacctgctgttctggcgcctggtgagctaagtaacttgtcccccacatggtaggcacttgtttgcaggcttgtgattatggctttaaggctggctgcatgctcctggcatttttattttcctttcctgatttttatgtattgcccaacatcagtgaagtcccattttaatttaacagccactggaacttgtctatgttccctttacatccacacgtacttttacctaaatataatcctagtctgcatgtatgtttgcatgcctttttcatgtaacatcataagtattttttctttttcatgtttcatcatagccgttttaactttaagccgtcttatcgataatagcttcaattagccattctgttgttgttgaatatttgggtcgttcccgagttgttactgttataaaatgctacaatggacatctccctgactctgctctgccatctttcagaggattctgtatgttgtacatcagctgcagaaccattgtccctgattaggatagcatggcttgttatccaactctgtgggagaatagtcaagtaatggatattatgtagaagggagcattacactttgcaagagaagagcttgatccccaaggaatggcagggaaaagagtttttttctgccccttacctttactgggctgggttactgtctagaattctctgccactccctccacatttttgggtataggaaggaacctaatgttttatttatttattcattcagcaaatatctgcgagcctactatgcgccaggtgtttgaaacttgctggtgggctgagcctggctgagcagtgcctttcactccgagggcctttgatactgtctaggagcaagactaggacctacttctagggtaatgagagaggattcagtgtcctgagccacatggggcctcattacctcatggttttacacctcaaggtttagtaccattataaatactaatcacactttaatttgggctgctcattcccagagatttcagagccaggctgagactcttcatacatggctattcttgatgtgcccctgggcctgtagcctcatggtagttttgttcataacatcctgggcaaggcaggaaggggagagtgcttgttgactggttataaaggcttcaggggttttattatagtaatgttactgtgttcatgtaaggggcgggggttggggtgtcacagatccccgagtttagcccgtgtatggcatagtggttaagcgctcaattgccaaccaaaaaggtgggtggttcaaacccaccagccgctatgcagcagaaagatgtggcagtctgcttctgtaaagattacagccttggaaaccctacggggcagttctgtcctgtcctatagggtcgctttaagttggaattggttcgataggaacagtttgatttttttcgtttggtatatgtggaattagtgctgctgggccgtcttgtcttctggcggactgccccttcctcctttttttccttactgactcataaaaatttctgtgtaccctactgggaaaatgtagaccacttgagccattcaaggccatactgtgcctctaaaacccagtgttgagtggagaaagcacttgaaatggttgtcagatcttaacagtttacttaggaaggtgctaaaaccctgaattgttgatttgaggtgagaagcagagaggctagtgagagcactaagagttaagcctcatctctaccctttcttttcctttccacctaccacttgttacctttctttcactttcagaatttgatctgttctatgcatatatcttcagatatatttttcctagtgtacttgaaaaactactgaaaaattccttttcaaggagaggagaaaggctttagacaatcaggaatagggactctgctctctctctccctcggccctggagttaactcaattggcctagatcttctgaggggtggctgtgtttgtgtttcattgggctggctttactgagtgggacacaaaaacccaaagcacaggccattcccacaagcctaatattttcatatttctttgtctgccaaagaatctttggttagagttaagaataactagtctgtctgtggaaataccaaggctttttgtttgccagaagaaaagggcttttgattaaggccttcttctcattttgttttcttttgcctaagctgctgtgagaagacttcagagcctctgaggtgctacgtttgagggggtttgggggaggagagatagctaaatagcacaagcagagacttaatcatgctttgctgcccatttgcacagagataaaacaaaacccaaaacggatccaatttttggtgactcctactagcctttctttcttcctgacctttatgaaatccatccaaaacagtagttcccgaaggccctacagtactaatctgaccttgaatcttgctctgtcctttagtgattttggtcaaattacttagcctttctctttagctcagagtttcttagctataaaatgaggattataatagtactgttctcacagttttttttcttaaatgagaattgaatgagttaatacatgggaagtagttagatcagtgccgggcacataaattgctcagtaggtatcaagttttatcattactactactagtatctatggcaaattctaaatgtgtctgtctttctagtagagcctgacatttgtctttttagtatgtaagagaagcaagcattcccatcaggcatgatctttttatcaaaggcaaaggtttcttcttttttttttttaattgaactttttattttgagataattgtaaattcacatgcagttgcaagaaataagacagagagatccatgtgctctttacccagcttaccgcaaaagtaacatctagcaaaactgtagtacaatatcacaatgatattgacattgatagctgagatacagaacagttccatcacaaggatccttcatattgccctatgacccaacctcccaaagataatgtattctttttaattaaattcttacaagttttgataagttttttcaaacatatgcaaatttgttttcaaaagtggttcatatatatgtgtgtacatgtatatatatgtatatacatacatatagctatgcatacatatatttgggtgtgtaaactagtattaaaaactagcttttttgcttgataatgtatctgtggaaaccctggtagcgtagtggttaagcgctacggctgctagccaaagggtctgcagttcgaatccgccaggcgctccttggaaactctatggggcagttctactcgtcatgtagggtcgccatgagtcggaatcgactcgacggtagtgggtttggtttttttttttttttggtttaatgtatctgtatatcctcctttgtcactaaaaagaggtttgtctgtttttgtttttaatggatgtacaggttaagtgctatggctgctaaccaaagtgtcagcagttcgaatccgccaggcactccttggaaactctatgggggcagttttgctctgtcctatagggttgctatgagttggaatcgactcaacggcactgggtttggtttggtttcgttttggttatagtactataataccttttgggcacttggaatatttcaatttttgcttagtaccaaaagtgatgcatgaaacattcttatgtgacaggtatgtagatatggctatgtagagatctatcatctatatatttgtacaagttttaccgtacgagaaatttctggaatctttaggtcaagagatatgtacatttttattttaatgttgttgctgctgttaggtgccagtgagtcaatttttttactcatagcaaccccttgcgactgagtagaactgccccacagggttttccaggctacagtctttatggaaggaggcttggtggcacagtggccaagtacccagctgctaactgaaaggttgcggttcgaatccaccagagactctgcagaagaaaaatgtggcagtctgctgctgcaaagattacagccttggaaaccctgtagggcagccccactctaccccatagggtcatcatgagtcagaatcgactggacggtagtacgtttaatctatgtatgtatttttttaaatataattttacttattttgttgttattgagaatatacatagcaaaacatacaccaattcaacagtttctacctgtaccatttagtgacattgattacattttttgaattgtgtaaccattctcactgtccttttctgagttgttcctccgtcattaacaaattcactgcccccaaggttcctatctaatctctcaagttgctgttgtcagtttgatcccataggtagatagttcttaaaacagcataatgttcaaaaaaaaaaaaaaaaaaaaaaggcagacgttttttactagttaagctaaacatttgtttgcttttaagaagacttcaagggatatttttggtttaagttttaaagattatctcagggcagtagtttcaggagtgaaagatttgttctttatatggacacagacatcttagaaactcagtgtcttagttgaatagcaacaagggagtctatttcctttggcaaatgctgttcccattggagggtggaggggaagtcttgactactagaggtcatctactttctcagtctttgtctgagggcagtcttgtttcttgtgtttcaggagaacctgaaccaagcaggagaggaagggcccctggtcctccaaatactaggcagtgagagaggcaggaggaccctccacagggaaagaggatattctcagggttggatctggccccagtgacttggggagtgtcattaatggaggctctcagcaagtacctggctgctgcatttcactggccataagtaagagacatgctgaatgacctgccccaagcctctgagctgttttagaagctgctacctccttttacaagttgctgggggcagctaaggaaaaaaaaaacagaaacttagttttgtcgcctctttcttgctactgcattgaattgatcccctgccttgtttttctgtatttagctttttggaaggactcctttggctgccttctgcccctccccgctttcttcttttctgtacggtgaagtctcatattactcccgcaggagataaggttctaaagacagcacataacatgaaaatcccaaatcatcaaaattatccttgaaaaataccttgaattacccataaaacacagtaaataacatggttttgtgtataggccatacagagttggaacaccatatgaagtatttggcctgtaattaggggacattttatatgaaataataatgagtattctcgaacactagaatcatacttagtgttcaaggtgctcatactgtgagaggcatgtgggaattgagacttgctgaagtcgcagattcaagccctcacctcatgttctctgtagtatataacctcactttggggtatgagctcactggggaggatcatgggtaagcctctgcacggctcagtgatttctctcctgtcctgtttggatagtaaaatgcgagcctgatgggattctacctttcctgctttccctttttcctatttcttcttccccctttttaatccttgttttcttcttctaatctcatttcatagctctcagcaattctcttatccaaaatgcttatttgtgtctttgcttgttgcatttcttaattattttctgtgggggagggagtgggaggtgaagacctctaattcatttaaattctgtaatcataacttccactttcctctgctcaggtcctctgttaactcgtgattcttacctcttgcatataaatggcctttctttcctttgttttcttcacccccttcaggtcatttttctgtagaaaatttctgcttatactaggccagttagaaatgagttcttgttatgcctactaagcatcactggttctgtctccagatgtttggtcagtacttggatcagccccaaaatcatagtatcatgaagagatagatgaggaactgagaccaaatagagatgtcaaaggacttgccccaacttacagttaattactgacaagctgaaaccatcgcccaggtttcctgactggtagttgaatggcacttccctctgaatcacattgcttgtctttgaagccttggataggagtagccctttataagctcctttaagtgtttttttcccctccccagcctttgaggaattgtgacttaacaaaatgctaggtagtgtgaacttcagggggtttaaaattagttccgttttgaagatatatttgagaattatctggcattttctgagatagtatagagacctagagctgtgttggggctcccgggactgggaaccactcatctagaggtttgcgaaaagggaggatggtgagcatagtcctaggagggcgagggttagtgtagggaaccagctggaacacagaagggtggttcagaccagtaaacatttgttgaatttcactctttacacgatataggactaggtcctgggaatacagacaaagtcctgcttccaagagacttacagtccctggctcaacttgagaaaagaagtagtatatatgtttggagaagtatctcagtgaggttgtactttcttttgtcctgatttggtcacagaactggagggagtagagttgttattccttgatgccttgaaaataattcaaggcactgagtgttactttggtctttgaatagagaaggtggggatcttccagggttgcaagaaccaattgtacttactccatttaaagggcagctagaaaaaatggaggtcttttttccctttcgtctcttcttcttccagtattctctcttctaggagctctagtggtaagcatttagctaggtaatttcccatctatttttgtatttcctttgagcagtggcatctatcaggaaaaaacaaaaccaaaaaaagactaataagaaaaatgatttgcaaaagacagcctttgctttatgtagatcaaatgattcatcaggcctgggggaagtttatgcagtaagcattttcagacactgaggcaggtgcttctcgctgagagggaggggcatacagttgttctgggcattgcaaccctgtcccagcctgtcccttaagggttgtccagcttctccagctttttgtttgtttaaaacatcacatcttaaatgttaaagctgttgtcctggctttctcaagcctaaggaaggaaaatgggtgaatttctgtcatatacgtttcttctttgacctaggaaaactgtaaaacaaacaacaaaaaagtcaacaactaaagccctgcaataaaactaaaacctcaagttgttgaactacctaacagggtttgcctgttgaccaactaatgtttcctgtacaaaaattttctagattgatgaccaatgtacagataactgcagtgggcctggctgtcatcattttgctgtataagaaaggaatatagaaaggagtccaggagccatctcatgtatcattcataacctttttattgcttatggagaggaggatggtggtagtgggtcttgtgtgctgaggaggtagggcaagctctgcaggccccattcagaaggtactgacggtaacgggtacagccagtttctaattggcattagtaatataactatccttcagagagccagctggaagaagtgactggaaacatctcagcctgctctctgcactgtttacttcgctatctccaccgcagctgtagtgaatgggagagccattgccttccaaagtgctcttcagctgttctcagtgaccctcaagtcttaaccatttggatgagaataatgctgaaatcctgaagtcatttggctcagaagaaaagctacactgccatggtgataaagctcccggttgaataagtataatggtaatttccaagaatctgggtggtagttatttcaatcaagttgagcaatgggattgctgagaaggggatttccacagtatctaagctgtcagggaagcagagttatccctgctcttgtctacttacaaatcccagtagaggaacatgggatctcaagaaggtggtatccttgtcctcagaggcctgccagtgtactactccttttcagttagactgtactttttccttttaaaagtacttctacatactgaacgtaacctcagtacctcacagatgctacacatgttaacacccttcctgaaatctgaaatacatggtagtctgtaagcctttgctcttggggaaggagacttgggatttcatcttttcattctgtcatactctttgaggggagcagtaagaacaattttctctttcctttctctgttgtttaccccagtggggcaagtagttgctggattcggcaacattctttcccaaatattcgtaaggcatgtgagggtcactgagatttatttttaaattcttaggctggggttgagagaaagcagttgtcttcgctgaattccctcgtggaagctttcagctgcccagacacccccacgtctgcactacgcacattccggcagtctttaaagccttggctgtgaggagtgagattccggtctggcgtcttactcatggaaactcttcgtgaggcataggcatggcatgaattaggtgtcaggttggaaaggaggaggaacaggtggactgcaacattaatataaaactgctggcttggtgaagtggttttggagcctttttgatcgaaagtttccttccactttcttgccagctttagccagttcttgatggtctccttagttcccttccagggttttctaggagcattctggagacaggatttaaggagttaagctgaagtgaacttgtggagaatgattaaacaatgattagggatgttttaacttctgtttacaggggagaaatggaaatcattagttttgactgatgtcatcttatctttgttggccagggctgcctgcccttattcagtttcatttttagctgtgaggtgaactcccctccatacttctttactgatgtccacctttgtctttgatcatatccacccccacccccccatattgctcttgttggtctagggtagccaattccacacagagcagagtgggagtgggactcagttgctattctctgtgttctgttcctcacaggccttgggatgaaagaacaaataggatatttggagagccactggattggtggaaaaaccaccagaagtggagttgaggaggcctgggtttaaatctcagctgtgctacttgttagctgtatgatcttggacaagttatttaatctctgtaaatttcagtttcctcatctgtaagatggggtgataatttctacctggcacagttgttacgagaattagagttaagtacgtaaagagcatggcctggcacacacagtaggcgtttaattctgcttgaaagcgggagctttgctgtgtgattgaagaggtcagagttgcagtagggtttagactgcctttggtcagctttttgcctattttcataatttaattctataaaatatactactataaaattacattatcctttgcatttgtcctagtagcagccttgcagggagtttgaggggttttagttcttcacagtctcccctactgccaccaaagccactctaaataaacagagaatgtaagtaaaaacaggatgtttgttatgtaaatgcagtattaagatttattatggttacttctcccattccaaccagatagcccattttataaaatgtctggttctctactctgggactgatacaaagatttatttctctcaggaataatttgtggccagtttatataagaagatggtaagatcatttctgaacactttattttatcatatttgaagcatttgtattagagaaatggatcatggtcattctacccttcttccctcctaaggtggagtgagccaaggccagcggggcctggcagatattggagcctttgctatccctcttagtcctagctgtgctttgctaaatctcttaagtcttaggccttggggtgctcagctcttttggaaacttgttaaaaagcataatgtgttgcaatatgaaagatactttgtgtctttataatcagtatcttttagcatattactttttctggaggggtcctcaaaaaccaagggtctccagtgtactaactacctgataaagtataagaaaatgtgagtctttagtctcaaagtatcagttaacagtggttaacagtggctcagattgccttttattttatatatatggccatggattgaaagacctagtattgttaagatggcaatgctccccaaatttatctacacattcaacatgctatcaaaaccccagctggctttttttcagaaattggcaagctgatcctaaaattcaggacttagagtagccaaaacaatcttgcaaaagaaaaacaaagttgaaagattcatacttcctggtttcaaaatttactacaaagctacagtaattaagacactgtgataatggcataaggataaacatagagataaatgaaatagagttaagaatcctgaataaaccatattgtatgattccattttatcttatggataggcaaatccatggacacagtaaatagattagtgattgccagggtctggtgacatgacttgtctgtcagtttgtcatattgtggtggcttgcatgttgctgtgatactggaaactatgccactaatatttcaaataccagcaggatcacgcatggtggacagattttagcggtgtttccagactatgacagactgggaagaaggacccggcagtctacttctgaaaaaaatcggccaatgaaaaccttatgaatagcagcagatcactgtttgatgtagtaccggaagatgagcccctcaggttggaaggttctcaaaatacagccggggaagagctgcatcctcgaagtagagccgaccttaacggtatgtatggagtaaacctttcaaaaggaccctcatttgctgaggtggcacgcctcaaaatgagaagacatccattagtaatcagaatatggaatgtaggaagtatgaatctaggaaaattcgaagttgtcaaaaatgaaatggaatgcttcaagatcgatatcctaggtattagtgggctaaaatggactggtattgaatatttagaatcagacaagcatgtggtctgctgtgccaggaatgacagattcaagaggaacagcgtcacattcattgtcaaaaagaacatttcaagatctatgctgaagtataacactgtcagtgatagagtaatatccctatgcctacaaggaagaccagttagtacaacaaattattcaaatttatgctccaaccactaatgccaaagatgaagaaattgaagatttttaccagtttctgcagtctgaaattgatcagccacgtgagcaagatgcattgataattattggtgactgtaatgtgaaaatgggaaacaaagaagaaggatcagtagttgaaaaataaggccttggtgataaaaatgacgccagatatagacttttaaggacaaaagactcattcattggaaataaccttttttcaacaatataaacagcaactacacatgtggacctcaccaggtggaatacacaggaatacacatctgtggaaagagaagactgagaagctcaatatcatcagtcagaacaaggccaggagcttactgcagaacagaacattgctcatatgtaagttcaatttgaagctgaagaaaattaaaacaagtctatgagaaccaaagtgcgaccatgactatttcccacctaaacttagagaccttctcaagaatagatttgttgcattaaacacttatgaccaagtaccaaatgagttgtgggatgacatcaagatttcaaagggtggcttgagaagacaaagtaaagtattataatgaaatgtgcaaagacttggagttagaaaaccaaaagggaaaaacatacttggcattcctcaagctgaaagaactgaagaaaaaaattcaagcttcaagttgcattattgaaggattctatgggcaaattattgaacaagacaggaagcatcaaaagaagatgaaaggaatacacagagtcactgtaccaaaaagaattggttgacgttcagccatttcaggaggtagcatatgattaaggattaatggtgttaaaagaagaaatccaagctgcactgtaggcattggcaaaaaacaagggtccaggaattgacaggataccaattgaggtgttttaacaaatgaatgcaatgctggaagcacttactcgtctatgtaaagaaatttggaagacagttccctggccaaccgacaggaagagacccatatttgtgcccattccaaagaaatgtggtccaacagaatgcagaacttacaaacaatatcattaatatcacacacaagtaaaattttgctgtaggtaattaaaaaatggttgcagcagtatattgacagagaactgccagaaagtcaagccagattcggaagaggacttcgaacgagggatatgattacttacgtcagatggatcttggctgaaggcagagagtaccagaaagttgttacccgtgttttattggctatgcaaaggcattcgattgtgtgtatcataacaaattatagataacattgggaaaaatgagaattccagtatgcttgattgtgatcatgcagaacctgtgcatagtccaagaggcagccattcccagaggacaaggggatactgtgtggtttaaaatcaggaaaggtgtgcatcagggttgtatcctttcgccatacttattcagactgtgtgctgagcaaataaaaggagaagtgggagtatatgaagaatgtggcatcaggattgaaggaatactcattaacaatctgtgatatacagatgacacaaccttgcttgctgaaagcaagaggagctgaagcacttagtgataaagatcaaagactacagccttcagtatgcattacacctcaccatgaaccgaaaccaaaccaaacccattgctactgagtcgattctgactcatagctatcctgtaggacagagtagaactgccccatagggtttctaaggagcacctggtggatttgaactgccgaccttttggttagcagctgtagctcttaaccactacacaccagggtttccaacataaggaaaacaaaaatccttacaactggaccaataagcagcatgataaacagaaaatatagaaatcctatgtagaagaatataggatttcgttttacttggatgcacaatcaatgcccatggcagcagcagtcaagaaatcaaagcacatattgcattgggcaaatctgttgcaaaagacctgtttaaagtgttaaaaagcaaagatgtcaccttgaggactaaggtgcacctgacccaagccatggtattttcaatcttctcatacatgggaaagctggacaatgagtaaggaagatcaaagcagaactgatgcctttgaattatggtattggtgaagaatattgaatataccatggactgccacaagaacgaacatttttgtcttggaagaagtatagccagaatgctctttggaagggaggatggctagacttcgtctcatgtacattggatcatgttatttattaggagggacgagtccctggaggaggatgtcacgcttggtaaaatacagggtcagtgaaaaagaggaagaccctgaatgagatggattgatacagtggctgcaacaatgggttcaaacatagcaatgattgtgaggacggtgcaagaccaggcagcgttttattctgttgtgcatagcatcactgtgagttggaactgactcgacgggcacctaaaaacaacagagtctggcaaaagacgaacgggtacagtgtttcttttttgggtgatgaaaaagttctaaaattacatagtggtgctgtgaatatactaaaaccactgaattgtactctttcttaaaagggtaagttttatggcgtgtgaattaaatctcagtgaagttgatataaaaaattaaagtgatttgtatcagtgaaaagaatttttttaaaatgaacagcattttgtcagtttgtacttggccccaccagtgctgtgaatgttgaaatgttagagcacgcctgtcttgagcattggcaggttatcattgccctaaagcctcaaggtgaaaagcttcggtttgcaatcactttttgcaggaaaatagttgatgacattctctatcaggaactggcccttttaaggtgaatgctctgaggttgaaggctttccaggttttgagtgtgacggtctatgccgtagcctagttcttacttcaccctctcaactgtgtgccccactgtaatatagcttatgttctccgtcccaggctccattcccagctccaccaagaacctcgctgctgcttctttgtaactgtgataagtaactttattttttggtgaaaatatgtacagtaaaacatacaccatttcaacatcttctccatgtacaattcagtgacatgggttacattttgcaagtcgtgccactcttctggacagcctgttccgaactgttccactgtcattgccgcacactcactgccctgcgaagcttctcgcctcgcctttcgagttggctgtggttaatttgaccacatgcagataattctttagaagagtataatgcttagtgcaaacattcttttctaattaggctaaacagttatttggttcaatgatgattttaggagattgttttgagttcagggtttaaagcttttctcagggtaatagttttggagttcgtgggcctcagtgcttccagaatatctggattccatgagaatttggaattccgaaagacctgatttcttccccatttttcctccaggctcttgatcttgctctggggcgttctttcctgggaggtgtggatagtagctggaggagccactgggtggcgccctgtcgctagatgattgccaataaagaatgacatgcctggaagaggctcaggcctgtactggcaggaagaggtgactcatttttcatcaaaggaatttcaaagaaaatataatggcaggatgatgtcagagaagcaggtagagacagaaaccttgactgaggtgctagggagaggtgttcagtgttgtggttcactgggcactgtctgcgtgattgactggcatagctgacaggaaatgttacctatttttttagttcctgtcccctgagccctggtgtgagctgtgctgctcatgtgctgtcagaacatgtggtcatgactttgctgtcttgggtataccacatctgtatctgggcgagatggctcatgccatcctgtgccagttgtgcactttttccacatgcaatgtggcatgtaggggttcctgcactccttgtgtcagctagcagagggtgtgtcttggaattgaaccctttattctcctggtggctggtttggaggtgtggcatttcccctgacatatttagatacaggaacttgcctagacgtcagaaggtcagatctcagggactttacgttattgccagaagtacactgattccctccagtgttttgacaggagctgaatctttgctctaactttcttgcttggagttgggggcactccattggtgacaaagttgtgtatggacgaagctggtaacaggggaaagttatagttggggggaggatacataaattttgatatctttcaatattgtaaagcacgttggtgaggtgctcagattcccatttatattataattatgagagagtgtgtccttatcacctttgtgccttagcacctaccagaatctgtatgattgtgaggttggaggctaaatcaacagtcctctctcccgccacccccccacccccccgccccaaaagaagagggtatttattgctagtactctgcctctggtttcattcctctgaaaggatgccttgagagagatggcttagtcacattagttactacttttgtgctttatgaatatttcttctggaagtgacatggagatagggacttttaagcagcacaggacaccaccaagaagcagaagagattacttctctttaagaaatgtaagcaagaaggaaaagaaaaaacggaaacttcaaagtttcacttatttcttggcgctgtcttcagttgttgcatccttattaggtacatatggggctaaaactgatccttggagtagaagataggactaagaagaaggtgaatgaggagggactgagtcagataacttgtttctgagagaagggtgctggacttcatgggccccagtcctccctgccagcagcacttctctctgtatatctccacgaaataaatgatgagaagatactttaacctgaagtgccagagagctcagggagaaaggttccctagggtgggtttgacctggggtccttgagggtaacctgtgatataagtcaccacgtggctcactgagtcagaaccacccgggtcactgagtcagatgagtctcagcagaagaagcagtcctgactccatggaggctgggattctcaacacgcctttgacctttttggtgtatgtgggtggtcattttttgctcaaaaacttttaggggctcattatcacctgtagggtagaatccaaactcatcttgtcatttaataccatcccagcccaactttccataaaattatatttctcaaaattattcttaatttaaaaaattaaataatactataaggtttgtaacaaaagacaatcatgtcctgtcctatccttcctcatttctgagaaccacttccaagacatttagccgttttttagcctcttttatttttcactacatttctgaatcatgccctcgtattagtgattcttgatttttcagtttttttttttaattttgacattacctgtttatattttgttgttgttgttgttaggtgccgtcacgtcagttctgactcataacagccctgtgtacgacagaatgaaacactgcccagtcctgtggcatcctcacaatcattgctgtgtttgagcacattgttgtagccactgtgtcagtccatcttcctcttttttgctgaccctctgttttaccaaacataatgtccttctccagggacagctcctttttgagaacatgtccaaagtacataaagtacaaagtcttgctatccctgtttatacagcattctggctatactttctactacggaaaattagggtttggtttttcatccccacctccttaacacacttctctttactctttcctcccagtgtcacccgttactaccattgcacagtattcagtgtttagattattatgattataataatgataatatactacgcttgcatattctttcttgaccaacttttcatttttcctggaattaatagttgccttattttatcatttatttactgttctatgtacctatctctaagctctctcacagaattcttaacgtattagataatcttttggttcagtattttctttagagacaccctctaggagctctctattctcgaactccatttggtttgctctccaagcctttggcaaagctgtcatcttgggacttcactatcacaataggaaatttcttcacttttcttctgtgttggctcctgtatttctgaatgtcatgttgtcatttttttgtttgtttattccatcttttcattagggtatattttagagtaacttcctaagaaaggatgcatgagaggtaaatatttttaaaactttgcttatctgaaagtgtctttattctacttttcattttattaaaagttagggaatagagttctaggttgcaaggcatttttcatcagaatcttgaagatgttcttccttttggcttccagtgttgctgtttgagaagcccagtgccatatgattcctgagttttgtttgtgacctgtttttctttttgatagcttttaggattttatatttttatctccagtgttctgaaatgttatgatgatgtgcattggtgagggtattttaaaatttattgtgttgaattctcagtgttctttttacttgaaaatacatgcctttcatttattagttgtttgataactttcttccattttctctttctggtacttctgtttgttgggtattagactttttggattgatcctctggcttttccccacctctatattttctgtctttttgttctaatttatggtagagatctcatctctatcatccaactcttttagaattatttgtttttgctatcatatttttaattcctaagcatttttttcttgttctccgaaagttcctgtttaaaagtacttgttcttattttatggcactattaccttttaaggctctctgaggatatcaattacaatctctctctctctttttaatgcttttctctgcttccaacattgtgtctttcttccaagctctttgtctttcatgttagaggctctcttaaaatgtttgtttcttggtgatcttcatgtttaagagtgttattaggctctaaaaagctgattgggtgggtgggacttgttaactggagcactcttaatgaatgatcaggtaaggggctcagccattttgttaggggaacctgaagttcaggtctgtttccccagagaggaattggccagtctcctgtctggaacctttaaacctggcagccagagctttgaggttgccaagcagggcaatggaacagagtgtgggtggaggggtttactgttcatcatgtcaaattctacttgatatccctgttttcactggggcagctgactcttgacctcatatgggcctgagaacttttcaacaaatcttgttttcagccttaccttgcagcaccactccccctctgcccaaggcttcagaggtacctggtgcttccagttcctgaactttctggagtcctggggtaacacagtttgtttcttctcatccctattcccacaggcacttagcacaaagagaaagacaaaactaaatgagagaccatttgtctatcccttttggtttatcagacctttgttgatatttcgtttctgtggttttgtgccatttttattcctttgctgtcatttttctgaagtttcagaaaggaatgaggcaaatgtatgtgctaggtctgccacgtgtaactcagaattcgtggaagtgaatcttcccagcttctctgactgcccttctctctctctcttaaatacacaaactctgtgctctagcttcatttgcactttcttttttccattcctttgctcatgccattctcccctcctagaatgtctactctcctcatttcagcctgttgaaatcctacacaagtgttcttccaggcccattttatatgccttatccatggaaacccttttttgatttctccaactgaaatgaccattcctttgactgaattcctaaagttccattcactgaattcttgtagtcttgccaccatcatgacacagcatgtactgccttgtactgtatctatatacatataatttccctagttaaattgtaagtccttaaaaaacagtataagactggctctgtattttttaatccgtaacaattagcatagcctctaggtacttaaatattgtaaagaactatggaattatagaactggaaaagaatttagaaatctataatgccaactcattttatgaatgagtagacagattcagtgtggttaaatgaccctagagtcatataataagcccagggacagaactggaactatagcctagctttgtaactgctaaatccatcaataaaatctgataatatgctttattagctattctggttaatctagagttaaccagaaggacttttttgtttcattcttgttaaaaatgtatgtaaatatcttttcggtcttagtaattatagtatgccataggtaatttcagtttttgtttttttttaaataagtcaggatcttgaatattctaggttttgcaaagaccgaattggataatagttttcttccaaggcatgtgaacatcagagacccaaggattataggcggggaaaatgtaggcaactgtactgaagtgtgctgaattcaagaaaagaaaaaaaaaaatcagttatatgatatatttagagtgactctttattttttgcctaacagtagagtgcagacccaagttagctgagatctagttaaagtcttgctgtttgactattcatcagggattataagtcaaagtgtctttgaagtaaatggtgtcagtgatcctcctctggtcccttggcttagctagctcttggcagtcatttccagaatgttcgagatagaaccgtagattcatgtctgagggattagatgcttcaggaacatttatgaggagaaagttgaactacaactattgcctatttaagatttgttgactgtcacgtcaactaatggaaaaagccagatgccatccttttcctcatcccctactttgggcacttgaggatggatgggcaggtacttaagagtctgcccccttccgctgagatttggcttttcatcagggctttgccttacagtgtgacgctgagtaatggcagatggcctgataatggggagggtttgcagtcctcattggatagagctgttgctagacaagccgtcgatggtggaacgagccatcatcgacccctgggctgggttgggctctgcctcatgcccatcacttttggttttatctaaaatagaagctgtggttcccagattttggagagtaaggatttattgtactcactggtgtttctgcattgccacctggctgccattagagggaattcacagcaactcaggtcttgcagggagctgagaggagctatccctgttttcaggacagggctagtgttctgtccccttaaagctgttacccacatttccttttatgacttgttaagtcagaagcagctgggaggatgcattggggaagcattactcaccaggcacacgtagtggccctgactgctggcgggtaatctgggttgagctgagagtgagtcagctgggggaatggaagtggggggtaggggttgtgtgccaatgacggtgtcttttctgcctgttcttttctctgtgaggactcatcacaaagctgtgaatactagggaaccagttagggcagccagcaaaccagcccactttatggtgataatgtttcccttgaaaggaaagagcttactggaaggagttagcattatgttatgggtgtacacgggttttgagacaagcttgagcttgcatagtgaaagccctaattgtgagaatttcactggaataaaagaaatcacagaatttctttttcttggttatgaaactcagatttctgtatctatctttgtccagtaggggtcagtgggggcttagatgctaactgaaataacctgtcactaatcctatgtagcttagtggttaagtgctgcagctgctaaccaaagggttggcagttcgaatccaccaggtgctccttggaagctctatggggcagttctactccatcctatagggtcgctatgagtcagaatcgactcgagggcactgggtttttgctgggttaatcctatagtggaaaccctggtggcgtagtggttatgtgctgtggctgcaaaccaaagggtcggcagttcgaatccaccagctgttccttggaaactctatgggggcagttcaactgtgtcctgtagggtcactatgagttggaattgacagcaatgggtttggtttggttgggctctaatcctatggtagaacaatcatttttcttttctttatcattttatctagcatctctgtacattgagtactattcattttttatgatttattttttatattaggcagaaacaaaagatgtgaacttaggttaagaacattgtaggtctactgagtgttagaagcaaagaactattccagatgctaggtgaagaaagaaaccaaggctgagatggaattggttttatgggtaaggtttgaagagcaattacaaaaaaaaaaaaaaggagacggggaaagaagcagttactgagcatctgatgtgtgcctaggtattttacatatattccttatttaatcttgacaacaaccctgagaaatagatatttttatatattagaaacctgaagttcagaaatattcagggacttgccttcgggttctctgactttgaagtgatactactagcggaggtgttttcatctgtccttgggcccctggtaagggctcatgaaagaagaaggttttacagtgaaacctgtgagagccagaactcgacaggactgccttgtttttccaggtcttagaagttttctgcctttgacagtcactacttttctatcctcttagtggaaaatattcaagttttccttctctgataggtttctactttaccacaggttctggcttttgcgggttttactgtgttagagagtaagcagagcctggtagtagactctcctgagaaagactctaataatccttgtgttgtagattaggattctgagcaggctgcaggggtcagcaggtgggaagaagctgacgggtctgccttggtcttcaggtggcaaattctccctccttttcatttagggctgctgccagggtcttggaaactctctcacagagatctaaaattagctgtttgtatgcaaagctggtttccattgagtatttatatttataatataagtataagcttgcctaccttacctgcctcttatctgtaccttggcctgggctcttctgagcctagagtataggcaccctatgggcattaacaagcctgccaggatacctcgttgttgagatcctgaccccattgtcagctgcatgccctctcgtgcccattctgcctttttgtactcaaggtggctcaggaaaatgaaaattaatcacctatttcttagccagaccacactaaagacgtttctcattgagacagtttttatttttatttggaaaaccatttaaaaaatgtatttaggctggattggagtaaggcactaactctccctcagtgtgcattcacttggaatgagaaatatttctggacaaaaatagcaattcttatagacaggctgcttttccttgtatctccttttctccatttaagttacagactaccacggtttcctgaaaaaagtttaatagctagatcttattattttttagggggaaaatggtcagaatcccaaagagaggggttatttaaaatgcaatatggatattgtggttggttagatatttttgtcctttccctttctgaatcaatgccattgaggcctagtttgatttagtcattgagctgatggcttagagatgttaaatgccatatattaccctggcttaactccttgcattggacaccgaagatgacttggtgctctgctagggtgaaaatgctctagtgtagtaacgatgataacagtaaaccaaagcccactgctgtcaagttgattctgactcatacataaaacccagtgccgttgagtcgattccgactcatagcggccctgtagaacagagtagaactgccccatagagtttccaaggagcgcctggcagatgcaaactgccggtccttggcttgcaaccgtagcacttaaccactatgccaccacggtttctgactcatacatagcgaccctatagaacagagtagaactgccccatagggtttccaaggctctaaatctttacagaaacagactgtcacatcttcatcctctctgctcccttggagcagcttgtgggtctgaaccgccgaccttttggttagtagctgagtgctttaaccactgcgccaccagggctccttgataataacagtagtttacattaacgagcattcacgatgtgctaattattccatgcagtttctcacttaatccttattgtaactgtgaagggataccttatgatccacattttacatatgaggaagctgaggattaagagattaaataattggtccaaagatatatagctagaaatggcaaagccagaatttgagtctaggtttggctaacagattatgttgagtgaaacagagagagaggggcacgtgggtttaggggaagttttccaagtgctgcatcaaaacatctcctactttactttctaccctattctttggctttacttcccttctctgaagggtaagcacctgcattgttgagctggacaagaaggcctctcagagtttgaaatgttgggcagaatccgtatctggagagatatgcagaagtggaatttctgaattaataaattggcttcttgccagctccaagaaaaagcaaaacttgtgttcttggagtcacttttttctttaagctcccaggtggagttagaagttcactgttaaaggtggtttggcgccttttttagtatacatgatctactgggtctatctaggggagcatattgaattattcctgccaatagataaatagctttccaggcacttactttgtacatgtttttgtggtcaaaatagatgcattcccagaggaaatgcatcattttgggaatcttcatggtttcttggaccccatcttgctctttctagtgtacttgcccccttatactcctgactcttacagtgtcctcagatcctcttgttcattagttatcgcctgacaccatcaagttggttcccactcatagcgcccctgtgtacaccagaatgaaacactgcccagtcctgcatcatccttacagtcattgctgtgtttgagcccactgttgcagccagtgtgtcagtccatctcattgagggtcttttctctttttcactgaccctgtactttgccaagcatgatgtccttctccagggagtgatccctcctaataatatatccaaagtaagtgagaccaagtgtcactatccttgatcctaaggagcattctgcctgtacttcttctgagacaagtttgttcattcttctggcagtccatggtatatccaatattctttgccagtaccataattcaaaggcatcgattcttcttcagtcttccgtattcattatccagcttttgcatggatataaggtgagtaaaaataccatggcttgggtcaggtgtaccgtagtcctcaaggtgacatctttgctttttaacacttcaaagaagacttttgcagcagatctgcccaatgcaatacattgtttgttcattaatagctaatttatttattcatttattccacaaatagtttagtgactaacattttacataggagagtagacaggaatcctagcttcagaaacttaatctagtgagagagtaaaaatatgcgcacgactctattgtaaagtagaaagtgcaaaatgccacgaggaagaaacaggtaaagtgtaatataagctcaaggcagtgagaaacgtacttcttgcaggagtggagggagggcacagggaagattggtgcaagtattagctttaagctggtctttatggatgggattttgacatgtggagatgggaaggaaatatattcaatggtaaaataaatgagggactgttataaaactagagagttttggacctaattgacagcaggaaattgaaagttttagaatgaaattacagtaaacatttattgagcatttgagatgtgccagtcactctatgtgcttcagggggattcatctcatagtgaatgaaggcatcgttggcgggttggaaactggaagatagattagataagtcatcggtttaccaaggttttgtacagtctgagcagtgttcagaggtctttgtggtcagatgtggtttgtttgctgctcctccaaataatgataataataatagctaataattattgagcatgtattgtgtgctaggcactgtctaaaaaccttgagtgtgttagctcatttactccttgcgacaattctttgagacaggtactgttattatcataattttacagatgaggaaattgaggttttgcaaatttaagtaacttacccaagggtggaaaatgtgatatatatagtagagtctagatttgaacccaggcaggctggcttcaaattgggcttgtaattgccatgctataatgctcatggtggtatagtggttaagtgctacggctgctaaccaaagggtcagcagttcagatctgccaggcgctccttggaaactttaatgctcatggcatctaggtttactgagcaagaaatttggagattttctaaactttattgtattcagtgacacttgggtatgtattctatgtaggtattcaggacctttgcgtgtttattgttgtctcagtaccacattgctaaaccttagaagttagagtcacagaaggtctcctgattagcttctgtgaagaccacatcctctgcctatttaaggttaaatgcctagtgaggtcatgggaggagatgaatgacaagagcccagggccaggctttgaagcctggatcctgccattcccagaagcccaaggtttccattctgtcagtcaatcataagctgttccttccaccaagtttgtaatcttaggtgtatttgttatttaaagaaaaaaaaagggggggggctctttctctctttttttcttacatttcagtcttttaattgtgatggaacttacatttttagtccatatctgcccaagttatgatgcttgtggttgtcagttattttgagcccaagtataactccatggccaaaccgaaaaaaccaaaaccattgccgttgaattggttatgactcatagtgatcctataggacacggtagacctgccccatagggtttccaaggagcagctggtagattcaaactgctgacctttttggttagcagcccagctctttaaccactatgccaccagggccccagatggcagtttgcataaaacatacagcatcagtcctcacagatttgttttggcctcaggtgtgtaggcattatattgactttggggtgttgccttgttttgagatttcctgtgggtagccgttgtgggcgaccatcttaaattcctgtgagtgaagtcatctcaaaaagaggcagatctaaaatcttttttttttttttaaattgtgctttacatccaaaatcttaataaagttctgagttacctctacaagccttcttttatggtttggtccctgcccattgctgttagcaagggatatgaggttggtacagtggctaagatcttggctgataatggaaaggtccgcagtttgaatccaccaccctatggggcagctctgctccatcctatagggtcgctatgagtcagaatcaactcaacggcattgggtttggtttttgatttttagtgcaagaaaaggcttagaagccttttcaatgatttaaaagctatatgtgcagcaagtgaaggtgatcgtgatgaagggtttgttgtgagcagggattggtttaatcatttcaaagcgagggcaaatttacgtaacattaaagtgcagggtgaagcagtgagtgatgttaagtatgagttgtccatagattggatgttcttaacctgcgtacttactatatataattttctaattaagacatgtttacaatggctttagatagcacaataggggagataaacgggtttcacttttgaaaatgaaaatatggtgaagatataagattgcaacgaatgttgtgcaggcgcgatacagcattagcactgcagcaacataccacgttgaagctgatattttttcccttagagcctggtggagctgtttacaagctcgggttaaatcatgtgaaaggaactattttgaatatgtaaatatctcaaattgcttaacttcaagttagtgtacttattttgctagaacttttagcaaagggaagcagtgtgtagatttataatgtataacagtatattgatttgaaatcagatggataaaagttcagatctctgttcatcttcttactcattttgtgatcttgggcgaaatagcttaaataatctaagcttcaagttcttgatttatgaaatgggcataataatatgtacctgtcagggatataaggattaaatgaagtaacagatgcaaaggtgttttatagtagttgctcattaagtgttcgtttccctcccaagccaagcccatctctttgaccagcagggtccaagagcttcttcacggtagggaacatgtcattataatcattttttgtgtcaagctgtctagcataatgctctctattacttaagtgaatgaatgaataaagtgccctgtgtcacaagagggcccagctccacagggagctccagcttagtctccactggactacatcatcagtttccctctttagtgcatattcccttcagcaaacatagctattacatttcacatgtcaagaaaaatccccttttgatcctacatccttctccagctcattccttgaaggagttgtttttgtgtaccgtcactgatttcttcttttcccgttctctcttgaaccactctagtctttttctccatcacactcttgttaaagtctccagtgacctctacattgccaaattcagtggtccactctcattgctcatcttgacccattaacagctttgacatggttaattactacttctttaaacacatccttcacctggcttctgggacaacatgctcatttggttctcctcctaatacactgactgttcttttttttggtctctttttagccttgttggttcttcctcttctcctctgtctaatgttggagggtttccagggcttagtccttgaacgtgatctcttctctctctctgtttactccctaagtgatatcatccagtctcatggctttaaaactccagctggttgtctccctgaactctaggttgctatattcagttgcctattcaaagttccacttgcatgtctaaaaggcatttcaaacagaatgtatccaaaatagaatttctaaaccctctcctccccacaaaaacaaaacacaaccaacactgccaaccaaccaacagtcctctgctgctctggcattcttctccatctcaggaaatagagattccgtccttttgatttcttaggccaaaaaaccttggagtcatttgtgactctattctttctctcctccttccacatgtagtcttatcaggaagttcagatctctctttctctaaaatttatccagaatcttagcacatctcagcacctttagcaccatacatttgtcccagccaccatcgtttttcacctggattattatagtggcagtattactggtttccctgctcccactcttgcctctcaacagtctgttttcaacatagcagcaagagtgatccttttaaaaccatgccactctcccacacagtaccctccaaaagcttcccatttcacttagaataaaaaccaagttctttacattcagccttttgtgtagacacagggccatgggtgatctgactctttgctacctctctggcctcatctgctgacactctccctctctctcttccagcttcagccattctaacttcttggtgttccctgaagacagcaaacatatttctgcctcagggacttagtacttagtgttttctttgtttggctgtccttcctccagatagccctgtgacttgtttgctcatattctttatgtctctgcttaagtgtcaccttattagagaagccatccctgaccattctgtatataaaattataaaccctcccccactggccctcccttctcctcttcatctccttaagcattcttcatagcatttatgtgacaaattagattttgtttatatttgttttctcgcttcgcttgctagtacataagctttgtgagaacaaggtctttgttttgtttgctactatgtccgcagtgcatggaacattacctaacacatagtagacactcagtaaatatttgatgactgaaatgcaggctggcacaaaattataggtggtcttgagtgccagattataaagttcatatttattaggtcctccatcaagcgccctttattatcttttttggttagtggattattcaaatctgaaatctttccctgttattatagattaaaaaaaaattactctatagttgtttaaagcacatggcactttttaaaagctttttaatgaaaatataacatgtttatataccatggtgtcttaggcaccataccaaaaccaaaccaaacctgttgctgtcgagtcaattctgactcatagtggccctatagggtttccaaggagtggctggtggatttgaatggccaaccttttggttagcagctgtagctcttaaccactgcgccatcatggctccaaaaggcaccacagagatgaatgaataactgttttggtagaaagatgaggctataacccttagactccctgagtgaagggtgctgggcatcacagaggaaatatagatgcactcttggatattgagtcttcagtgctctgttgtgtgtccacatttcaccttgtgaaatttctcttcagaggaagtggacaagggggggggtggtactgcgagtcctttgcatattcagttaaggtttgtataatcttctatagcctttaaatgcgttttatttaaagtcaggtttattgaagtataacttatatacagtaaaacttttcgacgtacagtcccgtgagttttgacaaatgtatgtagtcatgtaattaccactgtaatcaacttacgggacattttcatcacccccagaagttctcttttgcccctttgtagtcatctccctcccttcactctcagcctctggcaatcactgatttgatttctagccccgtagtttcgccttttccggaatatcatataaatagaaccacgtagtatgtcgccttctgttgttagcttctttcgtgcagtgtgatgattttgaaattcatccatgtcgttgcatgtatcaatagtttgtttgttttttatattgctgagtaatattccactgaatggttgtactacactttgtttatgtgctcacccgttgatagacatttgggttgtttctggtttttgatgattacgaattaaactactataaacattcacatacaggtctttgtgtggacatatgtttccatttttcttgggtaaatacctagaagtgagattttggtgtgagattttagcgggaaatggtatgtgtatgtttaactctataataaactgctgaactgttttctagtgtggttgtgcctttttgcacgtccaccagcagtgtatgagagttccagttgcctcaccccccgcccctccagtcttgggatcatgggtcttttaaatttcagccagtctagtaggtgtgtagtggttaagtgttttcaattgctgctacaacacacataccaaatgttcatttgtaagcaggccttggttttgtggaaggcatttctgttccccttgagtttcctgatgtccccttgggcagctagtggaaatcaggtggatttttcagctcttgaaaagtgcccccaaaatgcacttgtaagagcagtttgccgtccttgctgctcttcatcatgtgtagatgtaggtttgtttcatgggagcttgttctgtgtgtgatcctctctgtaaaggtcaggttgtttgctttctcctcccaggatgtggtcgctctctgactgctctagggtgcttgtgatgcatatacatccttatgtgctttgcctttctccccacaagaggttccccagtgctcttgtgacttttttcttctggctccatcctcgagtctggcgttccaaccaggctgggaatggaaagttagagagtgacgtcctctgacaccctcccttcacgtagagggtctgaggtttgtttgcttaggctgagcagaggatgccaaagatagaggtttgagtcagcttgacactagcttaaggctctgtttttcaccctccttgttccttcttctctttcccctcccccttctggccagttgtttcctgggctttgtctgagatacactgtacagttttagtcccagtctaccactgcctgctgaaaaatgctcagaggcgagatggaggaaaagccgccaggaagtttctgacaccactaagctccgggcctctgcctctgtgctgatagtacagaacagcagtaacctcaggagaaaggcatccgaggcctgcaatgagctgtgtgggctttgctaactcaagggaggagaaaggacggcctggaaatgcctatcttagattcatcctatttgccaccaaccatctttattttgactcacattcttggaattgctggtgttctctactggaagagatgtgccagaggcagagcaggtaactggtgccctgttattctttaaatctgctaggggctttggagggaggggtaaatgacggatgtcttgctagttgctttccttaaagggccagtatgtcccctcagctggggtgctgtcatactaagtaagtgtgtgtgtggatatactgaggaaactggactgcctcgggaccagtttgggacccagactccttcccgtcctgtgaggctgtctggctggagggtgctggttacatgaggtgatgtctgaactcgaaggtagagggaagtggagctgtcctcagtgtcctttctcagaaaatcaggtcccttacttactttctcagtctgaaagtggtttttgagacctttgttttcaatctaaaacaaacagtaactctattactcttctccagatacgggtgtgggaaaactcgtgggattggaaaacttctgaatgtggtatatttttgggtgagaaaaggcaggaagaacggttagtcagagaaatgggtcaagtggtgtccttgccgaggtgcatcctggaacactggggtgcctccctctgttctctttgatgtgactgaaactgttcctttcccctcaggcagctacacagtttatcctatgtttatctatgtcaccatgctcagtgcagggaagttaactgttctgttcactagggaatcggggccctgatattttaaaacaaatatattttttaatggtaccagtataatgtatataatggtttatactactctttcttcccatattgctgttagttacattatacttgactgacttctaaatgtctagtgcagggatcagacccgtatttagccaattctaagtctccatagctgaggatgagtaaggtctgacttttcctggagtacaccctggagtctttagtactgtcactgtgactgctcacaaccttcaagtgaagattttgagacactgttacttcatatcttacaagttaagagggagatttgatgacgtattatgtagctctctattaaaagttcatgaatgcttgacagaattagatttagtcactccctagtgtcctttctagtaagtcccagaaaagcttttgactaaatatccaaatacaagtgtgtgggtccatatcagcaaaaacaggcaggggttgtaaaaaaaaagtttgtgtggtagtgtgtttaaaaacagggaccccaaaacagctttcctgtaagcctgtgtctgagtttggaaagaacggggtagacaggcatgagttattccatactatttattatttcacatgtaatgagaaaataaatatcatttaggttgaggctactgctttttttcccctgtgcattgtgacggaaccctggtggtgcagtggttaagcatttggctgttaaccaaaaggttggcagctcaaatctacttgccgctccttgaaaccctgtggggcagttctactctgttttatagggtcgctatgagtcgaaggaaagcctagtggtgtagtggttaagtgctatagctgctaaccaagaggtcggcagttcaaatccaccaggcgctccttgggaactctgtggggcagttctactctgtcctctagggtcgctatgagtcggaatcgactctacggcagtggggtttggttatgagtcgagattgactcgacagcagtggggtttttttttttttccttgtttttggttttgtgcagtatggcaatggcatttctaaactactaatgatttatattttaagtttatcttcaatattggattctctacggaacttaggagtcatggctctatctttgatgtgcttccttttttatgttttcaaaatactaatttcataaacaaccataaaatacattgaactaaaaaagaagaaaattatattgtaaaagctttttatttttatgaaacaacattgattctagtacctaagcgttgtattgagaatgtgctatgttcagtttattcatctgtaaaaaaacactgtaaaagcagtgttttttttcaattggagattacagctaccgacgcttccatggaggtgcttaagagattctgcacacttttgattataatttcaattttagatatatttaatttattaaaaaattaaaaatagcatgcatactctaatgtacaaaaaccggttgccatcaagtcaattccaagccatagcaaccctgtagcacagagtagaactgcctggtaggatttccaaggagcagctggtgaattcaaactgccaaccttttggttagcagccaaacacttaaccactgggccaccagggccccatactctaatgtaccaccttccagttttagcacattagccatcaacagaataaggtctttccaccatgctgtgtatatatttgcctgcttacacgtatatacttgattaaaaaggtgtaggttgtctcttctgatctggtctttttttctttaaagtggacagcgtgtaccctgttgcagaacatactgcagaacattctctaataagttccaggcaaacctcaggtatatgggctcaggtgctcaggccatgacagtgtgtgacatattgctacaggatgatattgtaatattgatttagtatgtaataaaagtttttatgcttgtctcccttttatgttcatatttatgtattgtaaagaatctgcatgatttttaggtattgaaggtattcaactttgaaacaaatattttccgctactctttcaggcttttgagtccgtttatccgaataatattctgacattaccaagcaaactgtgaaatggttactatttgtttctatttatatgtttgaaccagttttttaaaatcgatactctgcaataaagcacagcataacaatagcatagaaataatctgatgtagttgttgatacaattgcaactaattagtctccattttcaagcatgtgtcttaataaaaattgcctaattggtcatgtcatttggctttaaaataagtaacataaagttgaacttataaaggtgatttatactattaaatactgatttatatgctctatattttgaactccctgtaagatttgtttgaaaaaatgttgtttgaaaaccactgcactggatagtctctgaggtaccttttagctcagcacttctaggatactgtagtctaggaaatcctctcttatgtttatatgttgttgttgttaggtgctgtaaagacggttccaactcatagcaaccctgtgtacaacagaatgaaacactgcccggtcctgcgccatcctcagaattgttgttatgcttgagcccattgttgcagccactatgtcaatccctctcattgagggtcttcctaatttttgctgaccctttactttaccaagcatgatgtctttctccagggactgatccctcctgacaacatgtccgtagtatatgagacgtagtctcgtcgtcctggcttctaaggagcattctggttgtacatcttctaagaaagatttgttcattcttctggcagcccacggtatattcaatattctttgccaacaccataattcaaaggcaccaattcttctttggtcttattcgttgtcaagctttcacatgtatatgaggtgattgaaaatacatggcttgggtcaggtgcaccttagtctttaaggtgacgtctttgctttttaacactttacagaggtttttttgcagcacatgtgtccaatgcattgcgtcatttgatttcttgacggctgcttccattaagtgttgattgtgtatccaagtaaaatgaaatccttgacagcttcagtattttctctgtgtatcatgatgttgcttattggtccagttgtgaggatttttgttttctttatgttggggtgtaatccatactgaaggctgtggtctttgatcttctaacatgccagccaccacagtatgataaactgacaaacaagtggtgaactgaagccatagaataaaacagaacttagcactagcactcagtatttgttgataatgcttttaaatacttttcagtacagctccccgctgcccagtgttttcacatatttatctcattattctcaaagcttcctgctgtcttagtttgagtcttgattttttttggtttaggactgttgaaacataatcttttatttttccccattcccttttcccgtcaatctactaactgtacagagaataattttttttttttttaaatacagagatgtctgtgtcactctcctgcttaaaatccatctatgcttcccctttgcttctaagagaaagtccagacacttcagcgtgacatgaaagggttttcatcatctgctccctgcctaatcactggtttcaattcccgctctggccttacaagcacccagcactccagcatcatttaagaatttgtagatctctacctgaaatgcctgtacccccttttcaactggactgcttgatagttgtccttaaaggtaagtagttatcacctctggaaagccttccttgactgaattaagagttcttcttctgtgctctagtactcttagcagtacttactcatcttgtcatcttgcttagcttgtctctctctcctccactaattataattagactcattattaggctgtaagatctttgaggatagggacttttattcatctctgtatctcaagtgccttagacaaaagagatgtcaataaatgttagctgaataaataaatgaagagattcaaacagtattatataaaagctccactaggaaccatgctatgttcaggtgcaccttagtcctcaaggtgacatctttgctttttaacactttaaagaggtcttttgcagcaaattttcccaatgcaacgtgtcttttgatttcttgactgctgcttccatgggtgttaattatggatccaagtaaaatgaaatctgacaacgtcagccttttctccgtttatcatgatgttgcttattgatccaattgtgagggtttttgttttctttttgtggcgatgtagtccatactgaaggctgtagtccttgatcttcatcagtaagtgcttcaagtcctctttgctttcagtgagcatgtttgtgtcatctgtataatgcaggttgttaatgagtcttcctccaatcctgatgccccgttcttctttatatagtccagcctctcagattatttgttcagtatacagattgaataagtatgatgaaaggatacaatcctgatacacaccttttctgattgtgaaccacgcagtatccccttgttcaaatttctcatttgtgtaagaaggagaaacactaagatctctagttttctgtgattccggtagtgcattatctggcccgtacttggatgtagtatgatactgtaattgagagcatggactctggagtcatactacctgtgtttttatctgagctttgccccttattggctgagtgacattaatctatatgtgggcctctgtttctccatccgtaaaatggggttaataaaattacacagctgttttgagtccttagaagcctttctgagcatgataccagtaccagatgctattgagttgattttgactcatggcatccccgtgtttgtctaactgtgctccatagggttttcagaagtagattgccagacttctcttctgaggcacctttgggtggacttgaactgccaaagcacgttaactgtttgcaccacctggtacacactatataattgtttgccattgttattattattattattattttgcacaaaagatatcattgaagacagagtctctttctgtaggctgctgggacaaaatacaaacacttgtctttatagttggaaattaagaaatgtgatagaagccaatatgggagtaaatcaaaagtatattatgaatcactggcacgacttctgcatgtacttttatatccttaaatagtgaatgattttgacatattaggaaagaaattcaataggtagcttctattttctgtgtattgtaggaagcaagtagctgtaaagtctcagataatctctttccccatatggaattggtgccttcatacccttccctccatttaacatctaaaagatctacagctggcaaccagattaaccttttttcacctcttccatctctggctgtctagtgaactatgaaattactaagagttgggcaaaaagaagggaatgacctgtataatcaccattccagttcatcttctctggacaattaagagctgcctggcctactcaaaagtcctctcctctgctgttagtggcagcttccctcttaaggctcaggacctcctgggaacgtgaagggaaggcctgtctcctggcagctagactgaccggacccccggcactctcttctactttcctcagtctgctgtgcctccagagcgcatcggtctgcttggatgctaggggagtgaggagacggcaggctgtgttcatcctcctcaaactttacctcataatgattattttggtttttggtgactgtgaaattatttaggacttcttagaagttgccccatttgttcatttgggacatgccctaaatctccagtctgccatagtatttttatttcttaaccttcccttacatagccccactcccatcccagttcacgtattctggtttagaggcagagactgcaggatgtaataggaggcacagctttggagctggacaggtggatagatataattttggtcgagtttgttaacctttgtatgtctttgcattttcatctcaaaatgaaaatggaaataccttttttagaggattgttgttaggattaaatgaaatgatatttagagttcttagcacagtatctgtgaactattggctgtagtagatgctcagttaattttatcttcatttattgagtgccttgtaaatatgttagagattggaatatgaaaagacagttcccccagggaacttaaatctgattagagaagttattaaatatgaatcaggaaatggtcattccttttttcttttctcttccctttttctaatgtgttccttttcctaggttaaggtaaattctaggaggaccctttcctctccaaggctgactaagaagaggctagtatgagggacaagggacaaactgagtagaactgtcacaggttatcggggtgactgagagcttagtcagggagggataaagtcggctgtgagtcccgttattagtaagcagcaacaggattattagtagtttgtaggtggaagggttgcccagcaggggagctgaggcagggcagagggcttgcttacactgagtagtctgctcacttgtagtcttggggggtaatttctggaaacttgctttcctgggtgctgtctttccttctctgccttcaggaacaggattgaaaacggcattagcctgaggaaatccttctatttcgggagtgagagcagagagccagcgattaggcccttatctgcggtggggccttgtgagtagttcggggccaggattgaagtgtctgtcctgacatagaagctcggcttttctgtcccctggttgggtcagaattgtgaaaaagcaataaatgggctgggccatctgaatgaaaaagccctttattgtgtttcttcaacattccagtgtctggtacaattagccaagactcggaaaacaagttggacaaacaagcatgcagctctgcgctgatggatcaagggatttctggcgcagctgagttaagtgcagtgactgcaaaggcacagtgggagggtctgggaagaggaaggggactttgagatgacattcacagctggatggtgggaaagaacggagcagcagcaaacaaatggtgtttttgaagttgatcaaatccaacatgctactctacctggaagactggctggagctggctactctgtaaagtaggtggaatcagtggggagagatttttgacttttgtctttggacagctatgagtgtggagacatgaaatttccctggaatctaggaatcttttgggagcggacagcatgtgggcttgctccactgtcatctccccatcatgagacctcagttggttaatattttatatgtacgtgtgcctgcagagaggcagacctgaggggctggttgttgggcaatggatgcactgttcctgacttggcagtaacctattttaactcaccagctgtcctgcaactgtctgagatccaccaggtcacaaacttctgctctgcaaatagagggtaacccagagaccaacttctacctgcccaggcttaatcaattaataacttgactggacttttgtatatgaagctcctaccttcagcatgctgctgttgatctgggaacaccaagcaggtgccacttttgaataggatgctgtttgcctgaagatctgggcccagcttttggaagtgacctagggaggagcttcctctttgacctaaaggggaggaggaggtcagtaggaagtggtgggtggagccacttctctgtacttctgctgtctttttctgtgccttgcgcagccctttgactgtctctgttcactttgccctcctttttgaggagctgctgaggtcacacaggccactagctggagatttcttgggagccccttccttttaggtggggtcagcagaagcaggggtgccatgtggcccagttaccaagatgagcacaagttcaacgcccacctggtttgccgcatgtgctgtatgggttagtatgtgaggcttttttccttgtctgggcttgaggatcccaaatactagcccttgctcccattaacgcatagaaatgtgtggggtttggagctttgcagacgttataaccctcgggcttgttaaaatgagcagtggaagagacggggtgccctacttcctgggggaacttcttaaacttgcaatgtctgtgggcagttgaaagcctaagctatgggtgtgggacttttttatagagactgaattcatgcccatgctctgcctgtgtcaggaaccacttttaagttatgttgcatagtgccgaaagcccgaggtatatttttagccgaagttggttggttacggagtccacctctaagctgactaggagaggaagggaggagtcatggccgaggtttcctctttggggcttactctcttacatttactcttctgccagttgtgacgaggagaaaaactgttaaagatggtttactgacagggacttaaagaatagttgggagctaggggaagagtcatgctggctgtgactttatctgtcttgataaggggaaagagttcaatttaaataactggctctgtgaccttgaataggtgacctaacctttttgggcatagattccttagtttccaaactgttggatgtatagattgctgctggtctgagacaaagttttcattaactctcagacaaatgaaaagataaagagaatgtaacgtgtctttcataaattaaacttacttaaagaactcttctttattctgaaataatttttaccttttgatgctgaaatgtcttttattttagaaaagaattgttataggtagtagcttgtttttagatacccttatttagcaaaatagaaaattaactttatgttagactttctaatttattttggaaaatttactggtttatgaaatctaagtctgggaagcactggactgaaaaactagttctcatatctttgattttatactgtgagtctttaaagcagaacaaaattgtgacccaagacagattttcgctaaaattgaaattcctggttgtctgatcggggggacccttagaagaaatcccagagcgtgggaatcacagagccaggggttcctcctgtcttctcactgctagaccagtgctgccaactatttaagtgctttttgagaaaccacggtgggactgtaatactgctggaggcatgaggaggggcaatgttggtctgttactaccatgtattctagtttttatctttcctgtgtcattgagattttctccctggtacctagaggatttttttttttttttttacctagaggaaggaatcttttgcagctgaaaatgcttgcaagatacacttagagtcaaggggtgttgcttcggtattcaacagaggagtacaagaaagtccagagtctgtattgacagtttaagggcaaaaatattaaacacccctgtttaccgtgcttaatctgttggaggcagcgtagtctaatagttaagaaaatgggctttagaatcaactgtctgcatggggctactgctctaccatttagtagctatagacctgggcaagttgcttaacctttctgtgcctcggtttcctcatttattaagtagagattacaatagactcttaactcatggcgtcattatgaggagtgtatggcattaaagtacttagcccagtgcctcacatatagtaagttaataaacactagctggtagctatataatgtgaaatccacataatatgaaaattcagtgcttgtctttgttcattctcgttatacaagttcagacacacaaatacacaccttgtttgctggagcgaagattcttttgagtaagctttgttttgttttgtttttttttgattggggtgcttggttgctggagagggtaaccctctctattatgagcctggcgtaactgccagcaggacctgtgaatccattctggaagtggaggccagatatgaagcagttgcattttctagcagagatgccctttgagaatacagataatacttttagttagcctgcttgaatttgtacttttttaagagctcccaggcaattttgatatggccagttcacagactggtatctggaaaccattgacctagtccaactcctcattttatagatgaaactctactcaaagagaggagataagtgtcatataaatataagaaccatagacttgttgttaggtgccgtcaagctggttccaactcatagcgaccctacacacaacagaacgaaacactgcgcagtcctgagccatccttacagtcgttgttacgctgagctcattgttgcagccactgtgtcagtccacctcgttgagggtcttcctcttttccgctgaccctgtactctgccaagcatgcatgatttccttctccagggactgatccttcctgacaacatgtccaaagtatgtaagacgcagtctcgccatccttgcttctaaggagcattctggttgtacttcttctaagacagatttgttcattcttttggcagtccatggtatattcaatattctttgccaacaccacaattcaaaggcatcagttcttctttggtcttccttattcattgtccagctttcacatgcatatgatgcgattgaaaataccatggcttggtcaggggcaccttaatcttcgaggtgacaccttagttcttcagtatttaaagagatcctttgtagcagatttacccaatgcaatgtgtcttttgatttcttgactgctgcttccatggctgttgattgtgggtccaagtaaaatgaaatcctggacaacttcaatcttttctccgtttatcatgatgttgctcactgggccagttgtgaggatttttgttttgtttacgttgaggtgtaatccatactgaaggctgtggtctttgatcttcatcagtaagtgcttcaagtcctcttcactttcagcaagcaaggttgtgtcatctgcatacctcaggttgttaatgagtcttcctccaatcctgatgccccgttcttcatatagtccagcttctcggattatttgctcagcatacagattgaataggtatggtgaaggaatacaaccctgacgcacaccttttctgactttaaaccaatcagtatccccttgttctgtctgaagaactgcctcttgatctgtgtaacggttcctcatgagcacaattaagtgttctggaattcccactcttcgcaatgttatccataatttatgatccacacagtcgaatgcctctgcatagtcagtaaaacacaggtaaacatccttctggtattctctgctttcagccagcatccatctgacatcagcaatgatatccctggctccacattctcttctgaaagcagcctgaatttctggcagttccctgttgatttactgctgtagctgtttttgaatgatcttcagcaaaattttgcttgcgtgtgatattaatgatattgttctataatttccacattcggttggatcatctttctaaggaatagaaataaatatggatctcttccaatcagttggccaggaagccatcttccatatttcttggcatagacaagtgagcacctccagcgctgcatcagtttgttgaagcatctcaattgatattccatcaattcctggagccttgttttttgccaatgccttcagagcagcttggacttcttccttcagtaccatcagttcctgatcatatgccacctcttgaaatgattgaacatggactaattctttttggtgtgatgactctgtattccttccatcttcttttgatgcttcctgtgttgtgtaatattttccccatagaatccttcactgttgcaactcgaggcttgaattttttcttcagttctttcagcttgagaaacactgagcgtgttcttcccttttggttttccatctccagctctttgcatatgtcattataaaactttgtcttctcaagatgccctttgaatccttctgttcagttcttttacttcatcaattcttccttttgctttagctgctcgatactcaagagcaagtttcagagtctcctctgacatccatcttggtcttttctttcttttcagtgacctcttgctttcttcatggatgatatccttgatgtcattccacaatttgtctggtctttggtcactagtgttcaatgcataaatctattcttcagatggtctctaaattcaggtgggatatactcaaggtcatattttggctctcgtggacttgctctgattttcttcagtttcaacttgaacttgcatatgagcaattggtggtctgttttacagtcggcccctggccttgttctgactgatgatattgagcttttccatcatctctttccacagatgtagtcaatttgatttgtgtgtgttccatctggcgaggtccatgtgtataaaaagaaaaaaactttttctttttaagagttttttttttttttttatatagctgctgtttatgttggtgaaagaaggtatttgcaatgaagaagttgttggtcttgcaaaattctgtcgttggatctccagcattgtttctgtcaacaaggccgtagtttccaacactgatccttcttctttgtttccgactttcacattccagttgccaggagactagagatcaagaaatccgagttatagacctggttttgtctccaattgtgtgactttgtataaattctttaatctcccttaaccttgatttcttcatttttaagatgatttttgagggtacggttttaactctgtatctttgtgtatctatgaaatattcatcttttctgaaacaggtaaacttttcttccctcttctcttcttttaagactttccctccttctctgtggctcttttcttttgccaccattacttacccctggcttatttcttcatctaatttatggtgtatattctttgattcccagtagtgcaaagaattatcattaatggagatcaggttttcttaagaaataaggtaaaattttaattttgcattgatgtttctagaattaccgtttctccaaagccccaattctcaatccttattgaagctttctcagtctgcaccaaccctcagatcactacctttcatgaatccccgttgtagttgtaatttgctcccctcctcttctcacttgattatataggcctgaattgtgttgcttcctaataatgtcacaggaggcagtagtgtatagtggtcaagtccaggatttggagtctaatggattgggcctgaatctcaattctgtacttactatgtgaccttgtgcaaattactaaacctttgtgcgcatcaatttgctgaactataaaatggggataaataatatgtatttgatagagttctgaggatgaaataaatactaaatgaggcaggctgagcacagtgccttacaaatagtaaatgcagtaaatgtcagtgtcagtcttaactcccaaagtagacgtgtatgcttttgaggataggaatcatctataatgctgttgccactgtagattattagtaagtactttttaattacttgatttcctactcagccagtcttctttgaccttccttggggactattaagtggtactaagttttatgtggcaggaacaacttaggaatgctgtggcagtagaagggacatctgagtgacagtccttgctgaaaagcagtcctttaattatcagttgggatcacttcttagtttgactttggaaataccatcttaatgtgtctttgtagaatttaaccttgatacatagtgggctctacatacatatttgtgaagtgaatttgtattcttgagtacctactggtgtcctaaatgtcagctatttaaggagatttaaaacatgattcttgactctgaagggctaacagttcagatagagaaatgggacttacatgcaaatgtatatatatatatatatatatatatggagtcctggtgactggtaaccaaaaggttggcagttcaaatccaccagtcgctctttgggaaaccttatggggaagttctgctcatagggctgttatgagtcagaattgacttgacagcaatggcttttttatacacacacacacatacatgcacagaggctttgtatgctcagtgccaagtaaattgagtaaacttttaagtgtcacatgcatccaaaggtggctggaatggccagaagggtctaaagggggaggtcggacttcagctgaaccttgaaaggaggttctaaattagatacaccaagaaggggggattaaaaagtctgttcgaggacacaggtgaacaaagccagaatgcaaaaggtatgttggggaacaatgtggagaccccttgttgtagtagagtcatgcaagagagagtctagggatgcagttggagcagtagatagattgtaaattctttcaggccaaaggccttgtctatatctcctccaatcagccaacacactaacacatagtgaacaaaaactagaattgaattcctcagggttatagagggctttgaatatgagaactaaagagttggacttgatcctcttgtctactctgagccactaaaggatttcgaatagaggggtgatgtgggcaaaatggtgatttaggaagagtcactgaaataggctgactactttccatagcctcagttatcaactgttagctcccaaatctatatccttgtttctgactgctcttctgaactctagacctaagtttccaactgtctgaaagaaggtcctactgacatcttcattgtgtttcttctactttatccctactcccaccaaatctgtgccttttattttccttatctcaactaaggtactgttctcctcccagtgattcaagctagaaacattagaattatcttgaactcttcctttctttaatctttcacttctaatttatatttaagggctattgtttctgcctctgcattgtcctgtgaggctgcctgccctctttacattcctgtggcttctgctctagttgtaactcttagatttgtttcttggcctgtcacagtagacccctagctggttcttttacctcatgttattgtttttttttttttagatgccataaggtccattcccactcatagcgaccctgtgtacaacataatgaaacagtgcctggtcctgcgtcaccctcacaattgttgctgtgtttgagcccattgttgcagccactgcatcaatccatcttattgagggtcttcctctctttcactgaccctgtgttttaccaagcatgatgtcctactctggggactgatccctcctgataatatgtccaaagtatatgggatgtagtctcgccattcttgcttccaaggagcattctggctgcacttcttccaagacagacttgttcgttcttttggcagtccacggtatattcaatattctttgctaacaccacaattcaaaggtgtcagttcttctttggcttttcttattcattgtccagcttttgcatgcatatgaggcgattgcaaacaccatggctcgggttagacgcactttagtcttcaaggtgacatctttgcttttcaactctttaaagaggacttttgcagccgatttgcccagtacgatgcgtcatttgatttcttgactgctgcttccatggatattgattgtgtatccaagcaaaatatccttgacaaccttaatcttttctctgtttatcataaagttgctttttggtccacctgtgaggatttttgttttctttatattgaggcataatccataccgaaggctatggtctttgatcttcatcagtaagtgcttcaagtcatcttcactttgagcaagcaaggttgtgtcatctgcataacgcaggttgttaataagtcttcctccaaccggatcccccattcttcttcatatagtccagcttcttgaattatttgctcagcatacagattgaataggtatggtgaacggatacaaccctgacgcatacctttcctgactttaaactatgcggtgtccccttgtttgtttgaacagctgcctcttgatccatatacagattcttcatgagcacagttcagtgttctgtaatttttgttcttccccgtggtatccatagttggttattatccacagagacgaatgcctttgcatagttaatttttctcccacaatgcatgtaacatctttgtggtattctctgctttcagtcaggatccatctgacatcaacaacgatatccctggttccatgtcctcttctaaacccggcttgaatttctggtagttccctgtcaatttactactgtagccgcttttgaatgatcttcagcaaaattttgcttgcatgtgatattaatgagatttacctcttagtggctctctactgcagcctggccttcagtccaccaccagattagttcccaaagcatgcctgtggttcagaaaatttcaatgacattcctttgtctactgaattaatacctcactcaagctttctgggtactctgtgatttgacctcagctgaccttgatagctttccttctcattatattgtgaaatgtgtgctatgtgtagccatgtggttctttaaaccatatcctgtgtacttaaatgtctccaaatcactgctcatacttcttcttcagtttggaattctttaactccttttgaggctgctaaaatcctacttgtcatccaaagctaagttcaaaaaccaatccatgaactcttctcctagccctgtgtcaaaattagtcacttctgtatttgtgttttgctgtcgtcttatacatcttgcatctggtgtgttttttatttggtgttattattaattatttacatgctgtctctgcctctagattgtaagctctgtgaagtcaaggaacagacctactctatttcccttctctgccagctcaggtatctcattttcagattaccaggtggttggcacttctggggttcttgtagtgcttgtgaattttctgtggcctgtaaggaaaaaagggtagactttgctctcatttgcgttttttaaagattcataaatgcactcgggccatgtggataggctctgttggagcaggacacaggactttactcctcgaatgcaggctttcattctgacctgaagcctattctcaaattgctcctagtggagttggacagacagacctgtcttatataataaacagtgaaactcataataaactcaagaggaagatcacctaaagtagtgtgtgtaaggggtgggaaagagctcctgcggaggtggcagttgagttgaaggcggacgaatgagaagtcagagatgggggagctacataccatgcagagggaacagtatatgccaaggcatggaagtgctagagaacatgccccatttgggggaaattgcatgctccttaaaaaattgcatgctccttatatatatatatatatatatacatttttagggagctctagtggcacagtggttaagcgcatggctgttaactgaaagattggtggttcaaacccaccagttgctctgggggagaaagatgtggcagtctgcttctataaagattgcagccttggataccctatggggcagttctgctgtgttctgtggggttgctatgagctgcaatcaattctatggcaacagatttggcttggcatgttattcagcaagactggaaattgcagttttcatggaagagtggatagggatgagtggcaggcaggcaccacgttataatgaatcttagatgccaagccaaaaagtttgaatgttatcctgaatgatgcatcaggctttggaattggattagagttgctttcaaacctgacttcctttatttgcctgtgacctcaggcaaattacttaacctctctgcgctttatatttctagtaaaataataccgatcttatagggttgttgagccttagaaataatgtttgtaaagtgcctaagtaggtgctcaataaatgctaactgctattttaatattattaggatgataaggagtcactgaaagattttaaggtagacagtaacaagatcagttttatgccttagaaagatttctggcacattgtgcagaatgggttagagcaagaaaacctgttagatgtgggagaaaagatcagttttagacaagttgaatttgaggtgagcatgaaacttttagtaggcaattggatatatgagagtggtgttctggataaaggcctgagctaaagatatcaatttgggaattatatgtattatatatatatatttgggggggggatttatgtggttacagttgaaaccacggaactagattaaagcattctgagagaatgtagagaacagctcttaatttttttttgaaaagctatggatttctttttctcccacaacgcacgtaacatcagaaatgttgcatgcagttttaggcaacgcatcacaccctttccccaggtccctgggcccttggatatcttaggaaccctcaatatagaatgaaaagagaagaaggctaaggatgaataaatatttaaggagtgcgcagaagagaaggaacaaccaaagaggaaggcgggggggggggggggaacaggataaagtggagtctcagattcaaaagggagagcgtgtttaaaaggtgaagggatgatgagcactgtcatctactgcagaaaatgtaagtgagctaggactcaaagctgtctagtggattggcagattaataggtgattctggggtgagcagtttcggtgaatttgtggaactagaagctaggtcatgtgggtgagtagaaagtgaggaagtggagacagtgagctttgtcattgtgcttgttcaggaagctgaggggaaagagccagtggagaagaagttgaagatataagagttaaaatataattgctggattaaggcttccaaggaaaagacgaaaggtggaagatagattttataccgaaggactggcctaggttacagggagggatgcctttgccactgaaacaagaataatgaacattggggtaggtattggtagtttggtggccagatctgtaataggctcttattaaagttggaaacaggcattaaatccttctgattcagtgacccttaaatgattaataaatccttgatgcctcaagtgttaaatttgagaacttctccatggattctcagttcatagccttgagaagggctgagtttttaagatcgaaatgaatcccttttctttttaaacctaattctttgattgattctcttgttctcatataagggtcctttctgagagttattcctctggtgttaggtggaacgatctttactgggcctggaattaaattagggattaatgtgtaggaagccaaacctaaaatttactagtttgaaagtctgagccatttggaccactctgaaagtctgtgtaacagttaaggttgctccttagcttccctaatgaatttccttgctaaactattaagatcttagtttccacacactgcaaaaggtcttagtttccacacactgcaaaaggtcttagtttccacacactgcaatatcctcttatcctgatgtttaaatcaggaaatagctttcatgcaacggatggatctgcatcataggatcctcaagaaggatcccccagcttaggggctaaggagatgtgtaaaacccttttctgaggaggcttatggctcagttcttagcaggctagctggtcttgggaaggaccatcacttgtaatcatgttgcccttggtaattatacccagaataagtgtttggctctctccacccgtaattgaaagtcacttcagtggacaaattagctattagaggtgtgactgataggagaccatcaagtttccttagtatattatcctcaaagaagggcttgatagagcaacagactaacttatggatagtaaaattaaaaagaatcaattgtgctagtcatatcttcaggtataaatgaaatgaggccatggattaaaaagaaataactccacctttttaaaatactgattagtttaaaaggaagtctgtaatccatttccatttctatttatatattgtttgacctgttacagcaaacatgtatagcttctataataaaagcaagaaagacaagctctgtctgcagagggagaattttttaaaactagaagcagattgttcttggtaaagcagagtgggcctggtattggtgaaaatgtggtgggtggaacttttagttggctctaattttgttttttcatcaagtctgcacatgccagcgcacaggtgatacttactggagtctttttttttttttaattggactggattcttgtaggtaacttggttctgatttcattctgtgtgtttgtttagccagtcttctaatcatatattgaccaatgaagaacgtatttttcttgaggttttattatggacagctttagctgttaagcaggagaaagatgtggtagtctgttcccctaaggatcacagccttggaaaccttatagggtagttctactctgcccgttagggttgcagtgagtcaaaattgacttgatggcggtgggtttggttttttatgggctagctgttaaaacctgtgggtgatataaaaattaaggcatgatctccttccttaaggagttaatgatctcattggtgaggtaagaataagggtatcaaaagttcagaactctatataattatgttagtgctgattgagtgatgagtacagtaagtgccataaaaatttagaggacaaaagagctattgagagagttgtgaggaaaggctgccataataatttttctcaaacacaaatgtgctcatatcattcttctatttaaaatctttcagggcttccctcttatttataggataatagtttgtactccttatttgtcatgatttggctcatgccatcctattcagttttaatacacaccctatcttccatccattcttaattctttttctttgtcataaaagaaagtttaatgatcagaaaacaattacaacaaattactataatttatttttagatagatctttcctctcttaacatgttataatttaaaacatttctttctagtctttgctcttcacaaattcttcagtgatttcatcacaattaagctgccaaacagtgtctacttccatacataataaggataatgaattgagtctttcttgaattttctttgtaaactgagggtttttgagtctctttagggatgaaaatgagcattctgttgtgcagtttgtgatcgttaaagttaggaatatgtgtaaagcaatttcaacattggaaaatacacattgtattttatcttctatcatggactcatacatgtctagatgagtaaaatttgtctttcctgatctataaacttagttctcatgtgcatctttaattcgttgcagttctctgaatgtaagctctggcttgtctccattaatttgcgttagatgtcacttcctgaagtaactttgtcccttctcttctctttttggctagcttctactcatcttttaaggtttggttagtcactcttctgggaaacttccgctaacattgcattttccctcccttactcaggcagacctaactactcttatgttcttgagtatactgtgcttaccgctgttatagcacctgtcaaatttcattgaagttatttcttttctcttctagactgtgatctcttttaaaggtagggattgtgactttgggatctgtattgccagagtcaaacagacttttcctagcatctaggtccttaatatagatttattcaaagaataaatgaggaaatgattgagctggattttaaagagaaagtagcatttgggtaggtggagagggaggaagtatcatgccatgaagggaaactaaatactgtgagcaaagtgtcagtgatttagatgagactgttgttggcaagctgatttggattccgtctgcagatgacatgggcttggaaaggacgatgatgttgtaaaactggatcaacatctaaaaaacatcaaaatatgttggagcgagtggtcaaatcttataagaatcctggcttcaaataatcgcaggactcaattaagtgaaagatgtattaggcttattattgttattttttctataattctagtggccccacatggaagccattaggtagactttaaaaggaagcattttatgacaatttatggaacttttaaagtcgtatgtgttgccttatgaggtagtgaattctctattaaatatttaagtggcaagaatatagatgtgtgtatattcatgtatgtataacaatggtagatgtatccaagtctgaatagacctttcaaccctgaatatatggttctttattgttggaaggattcatgtatctgcagggagttggacttagataactgctaaggtccattctgattcctaaattctgtggtctatagtaggaagaggtaattgttcagtgcaaagcaggaaaggataggacaaatgtgagagcaaggggcattttaaggtggagaagaaggatgtgaaggtaggtccagagttagagatggggcagagcttattgaatggctgcaatctcagaaaaataaggatagtgcagttaccttggagccctggtggtgcagtggttaagagctagggtgcgctgtggctgctaaccaaaaaggttggcagtttgaatctaccagctgctccttggaaatctatggggcagttctactctgtcctgtagggttgctatgagtcggaatcgactcaaaggcaatgagttcggattttttgggtttttagtgcagtcatctgggagtggagagagagaattggcattatttggaatggcacctgtacaacttttaccaaggaatcaattataacaattcgaagggaataactaactgggcagtagggggagggcctaggtgaagtttgcgtgaattattaggagccagatttatataattctgtagttttcttctgaaatgttctctgacttggagaagaaatgggagagtcaagcaacggtggtaattgagatttggagattgtcatggtgaacaagtagtagatatttagacaggtgagagtcctggggtattagtgagggcacctttgaattgcttaatcgtgttgcgtagcatagactgagagaatattagatattcttaacgaaggatgaggagaatgttcaggagaatgaaagattgagaaaggtgactggtaaacaggttgtatttggagaggggatgaagaagatgtggtagtgtgacagctggatttgaattagagataaaggctagtagccaagtagggcattgtcctttgagctcagcacatcaggtacagtgtcagcatcaacatgtacgttttagtaatgtgagggtagcggtggaagatacatgtggagataataaacgtgaaccaggttgtcagggagggttaaggtagatttgctatgtggagcggggtgggcagcagggacgggtcaatgacagtgatgattatttaaaccctgtggtacaggggatggcatgggcttcaaataaaaggaagaagggcggggctgatggatcagtggtctggaagtggctttggggaattagcaggagtgggagaaggcgagccctctgcaggataggccttctgtggagctatcactgtcaagtactgagtcatgtttctgttgaagtgaagaggtgaaaaaaaattagaatgaagaggagtttgcccacaaagaagtgggggttctgtaagacttaggagaaggaagggaagtaagagatgggcagcggaggtaagctagataactttgggagtttgcctggatggtgatggctggtaaggaaataggaatgagggaagaaatgggttggacagagaatgaagcattggtcgggcgggttggtgcatgtagagtgagatttaactgctgcagtgtgggcatcccaaatgccctttaccttggtgggaggggtcatgtcaaaggccaccctccctcttcttttgggatattcacaactgtggctttttgaagtttgttatgtgtatgtgctgagtggggtcactctcctcccctgagaattatgatgctaaagagtctttgccatgacgtgatttttgagggatgtgattctatctaatctgtaaagtgacaccatgaccaggactgatagggaaactcagataggccaaacctctgtaatgacaagagatactgtctcactgttctttgtggaaagccaaccctttttaagggatcctggagaaactgaggcatgggaactttttgcctgggtagcaaaaagcaatgccttctctgtgtttcctttacagatgaacgggaccgggttcagaagaagacattcaccaagtgggtcaataagcacttgatgaaggtaggacccctttatatatgctgtcctagctcctcttgctgctcttgttctggatctgtcattccctttgctcaggtagttcagattgcttgccatgtgctcaagtctatggaagatccacgtggcttttttttttttttaaactaacataatcataacagcatggaaacgtttactgatgagtttcctggtgtggccagtaatatatgccattacctcagaagatttaggttgccatatgatgattcctgggactcaaagaacacttcactcttagctttacaaattattttataaggctctttctttgtttttatttttcagtctgataactatgaaaggataaaacagagagaattttgttctcctctaagtacacaagttctaaatgtacagttcgatgaatttttacatgtgtatacacctgtaactatatgcctgtaaaggagccctggtggcacagtggttaagcaatcagctcctaacagaaaggttggcagtttgaacccaccagctgctctgctggagaaagatgtggcagtctgcttctgtaaagaattacagccttggaaaccctatggggcagttctgccctgtactatagggttgctttgagttgtaatcggctcggcagcaacaggtttggtttttttttaatatacctgtataaccaccttgcagattgtcttagtttcttagtgctgctataacagaagttccacaagtgaatggctttaacaaacagaaatttttctcacagtttaggaggctagcagtccaaattcagggcattggctctaggggaaggctgcctctctgatggttcggaagggcgggcagggggagaattcttgtctcagcttgtctagccggccatccttgtagttcctgggcttgtatactgatctgacttggtcattttcagatagtgtgggtcttccccctgtgtctgccttcttctatgcctaatctgctccttatcttacaagtgattactttaaaacacaccctatactgatatggctttattaacataacgaagaaaaccctatgtccaaatgagattacatccacaggtatagggttaggatttataacacatatttttgggagatacaattcaatacataacacagatcaagatacaggacatttccagaatttctaggggtggtgaggaggggggattttattattggagaaactgatctggcagaggtcaccggtgacctcttaattgcaatatccagtggcttagttttatcttcctcctatttaatttctctgtagcatttgatattgttgactaactactctttaaatgtctctcttactttggtttctgggacatttttttcctgaattacctctttcccctatgaatacctttttctacctctttcactgactttttttaaaataatttttattgtgctttaagtgaaagtttacaaatcaagtcagtctctcacacaaaaacccatatacaccttgctacacactcccaattttttttaatgagacagcctactctttccctccactctctcttttcgtgtacatttcgccagcttctaaccccctccaccttctcatctctcttccaggcaggagatgccaacatagtctcaagtgtccacctgatccaagaaactcactcctcaccagcatccctctccaacccattgtccagtccaatccatgtctgaagagttggcttggggaatggttcctgtcctggggcaacagaaggtctggtggccatgaccaccggggcccttctaatctcagtcagaccattaagtccggtcttatgagaatttggggtctgcatcccactgctctcctgctccctcaggggttctctgttgtgttccctgtcagggcagtcatcagttatagccgggcaccatttagttcttctggtctcaggatgatatagtcgctggttcatgtggccctttctgtctcttgggctcgtaatcgccttgtgtccttggtgttcttcattctcctttgatccaggtgggttgagacaaactgatgcatcttagatggctgcttgctagcgtttaagaccccagaaatcactcttcaaggtgggatgcagaatgttttcttaatagattttattatgccaatttacttagatgtcccctgaaaccatggtccccagacccctgcccctgctacactggccttaaaagcattcagtttattcaggaaacttctttgcttttggtttagtccagttgtgctgacctcccctgtattgtgtgctgtctttcccttcacctaaagtagttcttatctactatctaattagtgagtgcccctctctcacactccctacctccccgctctcgtaaccatgaaagaatgttttcttctcagtttaaactatttctcaagttcttataatagtggtcttatacaatatttgtccttttgcaactgactaatttcactcagcataatgccttccaggttcctccatgttatgaaatgtttcgcagattcctcactgttctttatcgatacgtagtattccattgttctttcaatgacttttcttcctctgtgtgactcttccacattgctcttttcccagggtcctaatattggctcttttcttgttttgttctctgtgttctcctttggtagacctgtctgttttagtcacagggattgttgggttgaatgaaatgcaaagacacacaagtagaaaggcgagagagtgatcccatagtatctgatgtctggatccagttgggctttatgaaaacttatcagttatcaagcagctaccctctctcttatctatgagggagaccttttgttccttcgtttttacttctttctgtatgtttcctgcattaatatgtacattaataaaactctcccattgcttatgtatgagccatcatggctgccccctaactggtgacacaaatccctgaggctccatgattctaaagacacaaacacagaaaattttttggctggagttgtctttttctccatgagtcagctgtgaatttatagttcagtaagctatggccagggaaatggccacataagtaaaacgtggcttcttaggccactcctttcatgtggactgtgggtgagagcaattttcaaatcactagatatggataaggaggcaatgatagagccctttccctgtattctttacccagccaaaaaaacctgtgtttctgacaatctacttgacaagtacatttggatgttaccctggcatgtcctatgttgaacacatcccaaattgctaaatattttcactcatgcacccagctgttcaaattaggaattcagaatcatacttgattcagcccttcctataatctctcctttgttaccaagtccagtcacttccagctctgtcttcttttctccatccccattacttcattctagtccagggttttgttattcattgccttgaccactaaatagttttctaatgaagttttctgtaataacagtgataatagtagtagtagtttattgagtgcatactacaagtcagatgttattgctgttagttgccattgagttggttccaactcagcaaccctatgtacaatggaacaaaaacactgccctgcaccatcctcacaatcattgcagcgtttgagcccagtgttgcctgccactgcgtcagtccatctcattgagggccttcctctttttcgctgaccctctactttaccaagcataatgtccttccccagggactggtcccttctgataacatgttctaagtatgtgagacaaagtcttgctatcctcgctttcaaggagcactgtggctgtatttcttccaagagagatttgtttgttcttctggaagtacatgatacactcagtattcttcgccaacactataagtcaaaagcatcagttcttcttcggtcttccttattcgttgtccagcttttgaatgcatatgaaacaattgaaaatatcatggcttgggtcaggcacaccttagtcctcaaagtgacttctttgctttttaacattttaacaagtcagatacactatactaagctctttacatggattacctcacttaatccttcagtgaccttatgctataggttctattaatatccccattttagtttatttttttttctcattgaacccatcgccgtcacatactaatctcctcatcgctccctagccctacacaaccaataatctacattctgtgtctacagatttgcctattctggacattttatataaatggaatcatacaatatgtggtcctttgtgactatcttctttcacttagtgtgttccaaggttcattcatgttggggagttcattctttttttttaaagccatttttaagggtacaattccatgatcctgtcactgagcatttaccatgatgtacaaccatttgttgttgttgggaatatctctattttatagatgaggaaaatgaggtttagagaaattaagttacttgctcgaggttacagtgctagaaaaaggcagaactgaaattttagaattcaggcagcctaaggcttagagcttactgtgctcttaacctatgcagtgctgcccctggcttctgctcacttctccaggctcagagtgccaaaatcccttcataccttaaactcttgctgaaccatgtgccacactattttatgactctatatctttgctcatgctgttccccctacttagaataccttccccaactctgttctgcctggacagcactaacttaatgtcttctccttaatgattttcctgactcccccatgtagaattgaccaccctttttctttgtcctctccctgtactcctatgtacatttgttatagcacctgcaacatttatgtacatcctacatctgcctgctagattgtagcttgaaggtagacactgtatcttagttcttacagtgaaataaaactgctagttactgtgtaaattctgtctatggtaaccagttgcctctgatttgatgacactaaaccatcatgataccgagccctttacaacctagttccaatctacctgtctagctgcattttcaggcactctcacttatgtagtcagtcctgttgacacataagaccactcactgctcattaaacattgtgtactttcacacctctttgcttatttatttctctccctggaatgcacatcctggcctcctctgcctggtcattacccacttatcctccaaggcccagatccgacatcactttctttgagactctgacagccatccctcaggctaaattgattgcacctccctctctgttctatatcactttgaagagatgccttgtgtgttcatgcattggtcttctcctttagagtgctcattgagggctaggactgtataactttctctgccaggtactacaccaagaacctaacagttgtactcaaaaagtattcattgccttgagtaaataatgttttgatagtgctttatagctcacaaaatgattcttacctgacttgattcttaaaacaaccatgtgggaggtaaaggtactttattctctcatttttttttttttttttttactactaaggaaagtgagaattagaagggtgaaatgacttgcccaagatcatacagctagtgagagatggtgctaaggatcgattgtgaatcttctggccaaaattcctttttttgtcctagcaaacataccccatcttattctgcttttctacctgtctcaaacaattgaaagaactgaatttatcctggctcaagtttgtgccttaaacctgtcattgaatacaaatgctttggctctctgctgctcattcgtagctggtgctgcctgttggatctctgccttggtgctgtgtgatgacaggaggcccagggagggagagactagaggaacacatcattgcattgttagaaattggaggccagccagagctttacataaatccctggctattttttgtctcttctcaggctcctagccctgcagttctaatggcattttgtcatcttgggacatttcagagggagattcactgctaaacagaatcattgctctgtgttggaattctttggggtgggaattaggaatcgagatttgtttttacaactcaagcatcctctgttccccaagaacgctcagattaatgttgccattggcagatagactgatataaaaccaaaagcagccaagcctcccaagttccagatttagttgagaaatatatcccatttggcaaatagttcattctggaatgaccaaatgcattccctttattaattgaggacactattgatccaattttaaaagagatttattaaagatgtaggcccctgaaatctataaacaacctaatttagagcacacactgataaacctaagagttctgtttatatggcagaatcatcaaaaagaaaaattggagtttttaatgaggtcttattgagagtacctgtgctacatctgtagggcctggtagctaataaagtatattccccttcaagatggatgaaacggagagcatgagcttcgaaggaggaggagaaatcctttcctggtcagtttctattgactagaggttagcaggtggaaaggaaaggccagtattaatctagctgatggaatagttctttccattttaatttgtgtatgtaatctggaagccatttaccttcctgtaacttgtgttaagaattccagatataccagcgtaaaatttcaaattctgcatttttactaatgttcccaacacttctctatttgaggctgtctaattgaacacagagtagtagcactaatatttgcaggcagtctccagcatagcctctgctgtagctgcaggaggcgactcactgcgccctaaacaccttgtggactttcacacctctttgcttattcatgtctgtgggaaatgtcagtggtgtttaatttaagagattgacaaagtagtgctagttagctgctgaggaggggagctctggctttgttgcctaagtgtgaccatatggtggctgtagtttgtggctgtatctgcctggacctgatttttcagggcttgatttcactctaaacgtatctcaaccccccaccagaaggtttaggtctgcatttggacttgggctttattctggattctttactccctatgcgtaagttcctacctactaagtaaagctaccttttatggattttagaatcatcctcatcctcagagaatctttgttaagcatggttggctggtaccactgttagattccttcaaaacttaggaagttcacaaaacagataggtgatagaattcttatctgcaaagagcctcacactgtttccctgtcttactttgcttattccagcagggattcccagcctctactcttaactgtttgagcagatttctttctagagtaaaaaacctaggacaactatactctatttttcagcattaggctttttcttgaagataaatttatccaacgaatcaacatgaaattcccctcttacagttaagaaatctataaattcagaaatccagctgaaaattctaggcttactctcactttccctgtatcttttaatccatgtagatgagattaaataatattcttttctctttaaaactttctcccctgacgtatttattgtttttcaacatagtttagatgaaaaaaaaaaaaaaaagagctgcttatatttccttttagcagcttagaggaaagcttttttgggtcaggttttctgcagatatcaaagaattctacctgacaatccttggttctttttggagggtgtcttagttacctagtgctgctacaataaaaatatcacaagtggatggctttaacaaagagaagtttattctctcacagtacagaaggctagaagtccaaattcagggcaccggctccaggggaaggctttctctctttgtcagctctggaggaaggtccttgtcagctctggaggaaggtccttgtcatcagtcttcccttggcctgggagcacctcagcgcaggaacctcagatccaaaggatgcactctgctcccagcgctgctttcttggtggtatgagggccccgtgtctctctgctcgcttcttacttttatgtcttaaagagattggtttaagtcactatctaatcatgtagatctcatcaatataactgctgctaacccaccttattattcatcattgtgataggatttacaacacataggaaaatctcatcaaatgacaaaatggtggataatcacacagtgctggggatcatggccaaaccaggttgacacatattttggggggacacaattcaatctatgatagagaggctgtcttattatttaataatgttgataatatatgattttaacccttcaggcatcagagaagtcctgtgaagggagagagcactgaactgggagttaggaagcagtattgtagacgtagctgtcagctaaacaagaacttccccataaggtttccaaggagctgctgatagatttgaactgctgaccttttggttaccagccgaacacttaaccagagcaccaccagggctccaaacgatcatggacaagttatttaacttctctagacaatggttttctatcagtaaactgagggtgttagatctaggtgatcttagattcctttgggctcagattctgattccaagcaagtgcaattcgttccctttgctttaaaaaaaaaaaattcagaaaattgggggaagctgtttttcattggcttgaagccaacctgtaaaaaattgggagagcactccttggtgtgttaatgcacaggcctgggcatggggattggagaggattggcctgagtgagatggacttggtctctcaaaatttagtcatacactaattattttttaaaactgcttcattgagatgtaatttacataccatacagtttgcccatttaaagcatatgattcaatggcttttagtatattcacagagttgtgcaactatcaccacaatctatttaggacattttcatcacacccaaaggaaaccctgcacccgttgccgtcacttccagctccccaacttctccacctcccacccctaggcaactactgagcgactttctatctgtatagatttgcctgttctgaatatctcatataaatggaatcatagagtatgtggtctttgtaactggcttttttcgcttagcataatgttttcgaggtccatccattgtagcatgtatcagtacttaatttctttttattgctgaataataaataaaataccacattttatttatccactcatcagttgatgaacatttgggttgtttttactttttggctattgtgaataatgctgctatgaatattcatcaagtttttatgcgggcaggtattttcagttctcttaggtatttacctaggactagaattgctgggtcatacggtaactcagtgtttagccatttgaagagctgtcaaactgttttccatagcagctgcatgattttaattcccaccagcagtgtttaaggattccagtttctctgcctcctttgccaacacttgttattatctgtcttttttatcatagcctttctagaaagtgtgaaggagtctctgggtggtacaaacagttaagtgttccactactagctggaaggttggtggtttgaacccacccagaagcacctcagaagacaggtctggcagtctgcttctgaagggtcacagccttaaaaactctatggaatagttctacgctgcacgcatggggtcttcctgagtcagaatcaactctatgacaactaacaactacaataaacacaaaaacccactgccatcgagtcgattccgactcatagcgaccctaaaggacaaagtagaactgcctcatagagcttccaagaagcgcctggaggatttgaactgccgacctcttggttagcagctgtagcacttaactactgcaccaccagggtttccaaacaactgcaatagagggtgtaaaatattatctctttgtggttttgatttacatttccctcatggctaatgatattgaacatcttttcatgtgcttttttgaccattatatatcttcttcagagacatttgctaattttgacagtgattttcacatggagtgcaaacggccaaggcctcagacggttgaggtttttcactcatactttatttgttgacaaaatagcacgattatttgttggaaagaaacatccttaatgatgattcctgaacactcttggcctcacttggctgcttctaaaacttctgatacttagtccacagagatttgtggaaaacttcagaggcagcaagcatagtatgtgcaaaagggtaaggactttagaatgaggcagacctgcatttgatcaccctggccatatactagctatgtgatcttggggatgctacttgagccctccaaatcctattcctgcatctgaaaaatttctgacatagggcaaaaaaaaaattttttttttttatatagaagcacccagtaaatatcagctagtttttcacccttttctacccagagctgtgcctaatatgctttagaaatagacttgtcctttgttgttgaaaattctctgagagaaaactctcactatactcccctcccccattacctgtgtctgtatctctctggtagttttattttcatagttatttggtttttatagtcagacaaagaccgagagacataataagttagttctgatctaagctttttggaagagggttgaattttgatatacgtaggtgtaaaacgtaactgaaatgttcagaaggagattttggagccaagatgtgaaatgaactttacatttcaaggtgggtccttttttcttttcggtactctgtagtgtttaatatcctgttgatgacaggatctcacttgggcttcaagccctactataacttatttacataataattggatgcccaccctgatttttactttgtatgttcatgtcttttcaatcaaaaataaatcctaactgtgttgtcccttctattttttttgtcccttctatttttaatgcttatgtcaagtatttaatattttgtgacttttttttttaccttgcactcatttattatctgatttccaccactgtcttgaaaattattcccacagaaatcactcttacctatttgtagcaaaatttaaaaaccctttccttagtccttatccttcttagcctctgtagcatctgatactggtgatcattccttccttgattacactatcttggttttttgtctacctctttcactgctcctttttttaatgtcttttgttgacatttccatctcctgccttctaattttggctattccccaaggctcagtccttggcactctgctctctttctcgcctctaatgcagaaagcccaaccgttcccatgtctttagctagcacctctgtgcatgtgacttctaaactgaagttctcagctgacccagattgaattctggtatttccatctgcttcaggaacatttccaatttgtagcttcttcactggcattttaaattcaacataattaaaattgaacttaatcaaacccattccccttccagccctcccaacctgcgaatttctgttaacggcacactacggttgttctaggcccaaagcttgaaactttagacccatttgaggcaaggggttttgaaatcttggagccaggggtatgctggagccagtttgtgtggactcgtgagcaccaaatgttaaaattgtcggaaaattttcaagctgattgttacgcaccgtcattattaaaaattaaattacagtagaagttgtgaaacccagaacctgtgtaaggtggaaacctgtccgagaaggaaatcgcaaatattttccactaatggagagtgataggaaagtggtaagactgtaccctgtcaaagtcagaaaacttgcaattcctgggaaaacaaggaagtcctgttgagctccagctctcacaagttttactgtgtatgaacttaaccaaaaccaaacccaacccaacccactgccatcgagtcaattaccgactcatagcgaccctatagaacttaaaattaaataaattatatttaaaataaaagtaataaatactcaaaactcatcatttcctaattattgtactacatgttattattgcccatgttcttgaggttaatatactatcatatctctgtgatgaatatactatatagtagtgtgttaatatgcatttttttccaacattgcatttagtgatgttatgttagtagcttgaaaggagtcatggaaatcagcagatgctacaaaagcagggctagatatattgttttgttcattgtctagccttagacttaagaaagtgatagaggaaatcttaatgcacattaaacttaaaagtgtgtcgtgtctatagccaatacattgtgaattgcacaaaaaattgaggaaatattattctaatattccaattattacctgattcaacatgaacagttttctccaatcaggtaatctacccatccccttcttattcctttacacacgcaaacacacctggaatatttatacttttatacctagtcttggagccctgatgtcgcagtggttaagaactacagctgctaaccaaaagaccggcagtttgaatcaaccagctgctccttggaagccctatggggcagttctactctgtcctataggttcactatgagtcggaatcgactcaatggcattgggcttggttttggtttatacctagtcttatgtggttttcccatctttttttttttaagctgtggtaaaatatatgtagcaaacagtttgccattttaacattttttatgtgtacaattcagagacattaattatgttcaccatgtggtgctaccatcaccactatccatttcgaaaagattgtttacaccccagacaaactcaatactccttcagctataactcccatttccccattaccacctaccactggtagccactaacaaacttttgtctgtatgcatttgtctattctagatatttcacgtaactggaatcgtgcaatatttgtgctttgatgtctgacatacctcactcagcacaacgtgttcaggttcaaccatgccgtagcacgcatcagaagttcatttgtctttatcgttgaataatactccattttgtttatccatttatctgttggtggacactgggttgtttctccttttggccaatttcaataatgctgcagtgaacactgatgtacatatagtgaaagagtccctatctaaattcttaggtcgtattgtaattccgtgtttaactttttaaggaaccgttcccatctttctttctgcctatccaaacatctaatctttcaaatcccatctccaggaactctcccctttattttttcctattctcatcatattttgaatgctagaatattataattggaaaggactaagtaatcatctagttccttttccactcaaaggtagaaatcccaaaatcttagtgtctgcctgactaattctcgtgactagaaatccactacttctgaaagtagcccttgctgttgttgtttagaaaaatatatatattgaaaatgaatcttcttcattgtcatttccactggtcccctgattctgtgttgtgaccatcactcaaatgaaattgttgctagacttggaatgaatcagaagacctactgccacttactatagcgaagtgactttaatttctcagaacttttgcttccttggtttcttctgtggaatgggggtaataaataaacattgtagggcagttgttttggttaaataaataaaacaggattgtggctgattataaagcatagtagttaatggcagagtctaaagtcagaagaccaaattgaggccagttttttcatttggtgatcttgggtaagttacttaacttctctgtgccttgtttcctcgtctgcgcagtatgaataataataatagtacccacgatgtgggcataagggagagatgagatgacatataaagcatttagcatagtgtttgacaataaccacatgcttttccaaagtgagatttttctcccccataattttgattgctgaaattcactgttagaaatatttgacgagaggggttaaattggaggtatactctttgaaatactgggtacctagtattttagtttcctttgcagcattggagccctagaggtgcggtagttaagtgcttggctgctaaccgaaaagttggcagtgggaacccgccagctgttcttggtggcagtctacttccctaaagattagtcttggaaaccctatggggcagttctgctctgtcctttagggtcactaggagtcagaattgactcagcggcaatggatttttggatttgcagcgtctggaaggctttttggactctggttggaataatttctccatcattgactatcttatcacattttggtgcatagtaattcctgagaggtttcaggatgactaagattccttatcttcgtgcccaagcttcctcggatattgtttggtgttggccacggtatgtagtagatgtgatttcacttaattaaaaaaaaaaaagacttctggtaagtgttaccatctcatatgtattgtactccagtgtaaaaattcctgaatttttttattgctttcagtttcaaattctttgtattgggtttacctagaaccagagattcttgcatggataatgaagtaactcaagatcaaataacagtctcccactctcattcacaggtccgcaagcacatcaatgatctctatgaagacctgcgggatggccataacctgatctctctgctggaggtcctctcgggcatcaaattggtgagcttccctcttctgctaatggtggcctcacaagtgtggctcttttaatggcatataggtacatcttattgagtgctagggtaacagttaccactccttgcttgctacctagataattaaatatgcctgcctcttcccaaaatgtattaaaaattgctgtaggaaatcctgtctttctgaaggtaaatcctgtctgagcctctcagcttgtcagataatagttcttatatttgctttgtttgaggaattataataaacctcacttgtgggtctgtggtcctgtgcacttgctgcctttggtgaatgcttagtcattgtttgctgtatttaaagaacagaatttggcacaatagattttggctctttaagtaatgtttgactccttccaggattagggcttggcttcccctgggtcctttgttttggtttcacatcttttttgccccagtagaatttatatattttaatggcttaaaattgacagaaagaagcttttatgagcacaaattttagccagttctgagcacatggcaaattccagttcttccctgaccctcatttataatcttataattaatcagaatttttctttaactctacaggactgtacccttcagtgctcataaagttatattttgggcaatttggctggtatatttgataaatttgtagtgattttatattgaaaagtgcttacaaaataggttaaaactactgcagtctaattttatttcctaacctttgaaaccctataggtgtttatggagatacccatgagatagcatcttttcagcaactgccatccaattttatctctttcatggttattctcataaaagcagagtgggtgggtgaatatggagaactgaagatatatttcaacattaagtgtttagtgtaatcatccgctctggtcttgatttggttttgcatctttttggaggtgggagggtattttcactttttttttttttttatgttgcattcatttcctttcatttttgtgttgtgaattcttgttattctgttgtgtctttgccttggttgatggccaaaggagccagcagggctgaagaccctccgtctggtgagcatgccctcctggcgtcatacaaacagcgaggagcaggaggaggaagatgatgatgatgtagtaggtcctcctggggttgccagcaccgcagctggcactgcagggccatcagagagtctgaggttctcaaggtctccaagtagctcagttaccaattgccttctcccctttccacctgggaatgtaggtcccaaagaaagtggttaaaactaattgtgcctcttaccactgtttgctgatcctggagtgggaattgttttgcctacctgagagtggttggcaccaaaagaataatggtgtctgaaggtgtcaagtcctgttgtcacctggagacctctagctttctggtggccttgctgtgttgtttgagtccagattgcagaattgtggagggcttagttgacagcatgacagttaattgctcatggctccacactctagactaactaactggtactctttccacctctctagcctccgggttttcatcacttgccacgccatttgttttcaaatcagcctgttgtttgcaaaccactcactgcatggtgttgttggtagaggacagcaatttaacatgcatgtcttagggtatttattttggtgatggttgtaggggagtaaatattagaacgtgttagaggggcatttcatgttggtaggtcctaaataatagctcataatctttcttcagaagtaagtagacaatatccccagcccttgtccccttaaagtcatcttttcacctcactgatctctcttcccattgccttagagccttcaattttccaggttctgtcatttcttaggtccctgggcggcacaaaaggtttgtatttgactgaggagccctggtggcacaacagttacgtgcttgactgctaaccaaaagattggtggttcaaacccacccagtggctccatggaagaaagacctggcaatctcttcccataaagattacagcctagaagaccctgaggagcagttctcctctgttacaagccaaaatcgactcgaagctacctaacaacaatgctaacctaaagtagttcaagcccacccagcagtgccatagaagaaaggcctggaaatctgcttccataaagattacagccaagaaagctctgtggagcagttcccttctgtaacacatggggttgtcatgagttggaatcaacttgatggcagaaggtttttcggtttggtcattccccaagctatatgcacagttagtttagttgagatcactgagaagaagttcttgctgaaaagattttccctagacctttgatttagaaagttacctgtttcccagagaggccttggcatatctgtagattgtcctagtttgggagtattgcttagcaggctttggggtaaacagggagatgttccacctttctctctctaagtgttgggtgtttttttttttttgcccattttgatcttgcgtaatatttcctctctgcaggtacccacaacagagctaccttgtatttcattagcctttaattagtaccaatttgacatttacaaatgaattgattataatctagtaagagtaacgttttagttcccagtttgagtaaaacgaaagaaaacattggaaagtaagcagaagaaaatgttctagaggtagatagccatccctgcttgtgctcacaggcaaacagtcttcatttactttcgatggatagcagtcgaactttggacagggtaccagagacaccaaatggtgatgggtcgtgtgacatccaggactgagtgactagcaagattgggaacaaagaaagaataactttctttggggtattatgttcaacagcctatatcatcaaggttttgttaactgtctatatttcatgctggagtaaaaggtgccttccctatatcaatacccatttttctggggaattgataacttcctgatttttgcctcccattttggatattttcacttgttcactgagcacgtgcaactccccattccccagtatttgagtgggctgcctctaggtcctttggccaggtttataacaaggtctactctgtccgttactgtccattatacaatcagggctctccatccttctcttacaatagcatctcactgtgatttcgggagccatagagcttttgtcttcgttcccattaacctcgcgtccagagccttgctctgcctcgtgtgactgcaggagggtctgtggagatgctgcggcaccaattcagtgccagcagtcggaacgtactgtgtgctcacaggatgcgtcatggtcagcgaggcacacggcacctctgagagcctagtgaggcacacaggtcctgctcttcatcagtgctttatgcaaggctcccacgcctggcttcagccatgtgaaattcttttgtggtcttttagtccttgaaatgaaggaggaaaagcgtctgtgtgggtaaattggtatagctaaaaattaacgttttttggtttgtttgttcgcagccccgagagaagggcaggatgcgttttcataggttgcagaatgtgcagattgccctggacttcctgaagcagcggcaggtaagaccatcctctgcgttccccattctgccagggactgtcggcactggggccctacttagggatgttctcagtgaccctagtaagccctcagtaaatgctaaatctgactgacccagttctgatgctcacttctagtatagcaattgcattatggttggacaactcatttggtcgttagcccttacttaagagggcatgaccccctggaaagggagagggttcacagagaggagcaagatgctgaagactgaaccttggggactgacctcaggtgggaatcaaagtgaagaagaaagataaaccagcaaagaagatgaaaaaaaggtggcacatccaggaagagggagaaccagcgtgcttatatcatcatgaaaactagatgagggcattgtctggagtgttgagtgccacatcaggtctgagaaaaaggttttagctcttaggcattggtgacttacagttttgagaaagcagtaaaatatagagtatagccgacctagatatgttgttgtgtgtcgtcgagtagattttccaccctagataaggaaggtagacaacaacgcatttatagacatacgaggagaagccaatgaagaggttaaggttgaaaatgagagtgaggaagagtattaagtgttaggccttgaggtaccttagagatcttttagttcagtttctcattttatagataaagaaactgagatctaaacgcgtaaattgaccaggcccaaatcacacaagttagagcaaagctgggactttaacccagatctgacttgtagttcagcactccttccacaatctaggctgttttcttcacaccatccttcctctcattgcttcctgtttcatggaaccaagtcccggaattgagggataggatccagagctggtgtggttacctttgaaaaaattttttttacctcttctttggaaaaaggaaggaaagagaggtaaagatagatactttgtagtggagaggaaggagaagaaagtgagggaatttatcttcttggagtgagctttatggaaaacatttggtgttgccaagcgacagtaacggtcaagttgaagttaaatggtatggtatgtgttggactcagctcgattttggcactcatatcaacagtttccatttccttgggaggttctctttgtttgtgctccttcagaaatttacttcttctaatataacatgtatgactatattgttatttctctgtttgccccagtgcactgtgggctgtatgaggacagggaacatactctcacttaacacacagatttcagtttagttgaagaggtagagagagggctgaaaagacagtttaccacaaccgagtgggagctccatgagggcatgacagaagaggccaacagaggggttgaggtggaagaagggcgatcagctagctatctctgtttgcctgggacgctcctggttttagcactgaaagtgctttgtactgggaaacccctcagttcccagcagactgggatgattggtccccctaggtggaggggagggcctgtgtgtcagtgcacattgtgttgtaatgagattttaggagtaaagctgtgatgctatgggaggcattggcaggtgtggatgtctatgtcaaaggagggaaaatggaggtaggagcaggccaagcactggtgagggatttgtatttgataccagggcattactaaccagttgctgtcaagtcagttctgactcatggcgaccccatgtgtgtcagagtaaaactgctccttagggttttcagcggatgacttttcagccttccttctgaggcccctctgggtagacttcaaccgctaaccttttggttagtagccaaatgcattaatgatttgcagcatccggggactcaaagactagtgagagagaagagagacctctttcttaacctcaaaaaaaaaaaaaaaaaaaaagggctctgatgacttaattaaaaagcaatgcacaatatcacgtgcttggaaggttgtcctgctggtgggaattcagaatggtccaactactctggaaaaacagttaggcagtttcttttgaagttaggcatataacgtggcaactccactccaaggaatgtaccatagagaaattaaaacttacagtcacacaaacatttataattgcccaaaactggaaacagctcaaatgtccttcattgggtaaatggatgaacactgtgtagtacatccatacagtggaatactactcagcaatgaaaaggagcaaactactgatacatataatagcttagatggatctcaagggcgttatgctgagtaaaaaaagctaatatcaaaaggctacatatatgattccatttatatgacattctggaaatggcaaaactaggaactgggagctgatcggtggttaccaagagttaggagtggggacagagtttattacaaaggggcaacatgagggaacttcttggagtaatggaactattctgttatcctggttgagttggtagttacacaaatctctaggtgaattaaaactcatagaattgtacaccaaaaagtcagtttttattctctatgtaatgtaaatctgtaaaaaagcaaaacaaaacaaaaaactccagggctctgagaactttttttttttttaggttaaactggtgaatattcgtaatgatgacatcacggatggcaacccgaagctgaccctgggcctgatctggaccattattttgcacttccaggtagggcccatgaaatgtggggttcattctgttgcttggttggacgtggcctaggaagaactagaagttgcaccgcctcccatgggcctctttgagcctgccttctttgtatttggtaggaaacaaggatagggatgggagtctggaaaggagggttaagattggcctagagacaaagccattgcagcctaaacccagaacttcctcatcgttttcatgattaaatgggggctttttcacttctttgtggtttggccctgtgattggctgtgtggttattagaggtctgtttgctcagccgagtcaaagcttggctctttcgggactcaggagtatcagggatggggagagataaaggttttgatgctttagaagggtgggatgagagctaataatcttgttttggtgtagacttctgttcatctctaaagatcttaaaacaagcctggttaattgtagcaccttagtggctgggtttgtgtatgtgcttctcaggacaacctcgtggtatccatcacatccaagagcagtggcatcttgggaaagagtgttcacatggtcacacagccttcctgttcctccccgcttcctgaaaagacttaatcgtttttaagtctagattgctgcttggaaaataccacactctacttttatgaccgtttgaattactttagcccaaccaaataaaggtgtttcgcaggtagcttcgtatacccagttactgctcatcaggtcaatagattagagggaaatcctccccccccacccctcccaccaggtgggaaaagaggggactgacctcagggactgtagctgctctgaggtcctaactggggagatagctccacctgctggttgaacacagaacagtctctggtgtctcagaattcttaagaatctgacaaaattcttgcttagacctgtttcttgggactctggttggggccattgctgggaatcgggagcatgggtagacttaggaaagtgtgcaggtgatatgtacttttatggaatcccagggtgttctcaggcatgctttgggtgtaggggtaaccaggaccatgaacttgacaagtgtgccttgtcagggtgggaactagaacacatagaagctttttttttttttttaacttttatggcgatctggatttaccctttggaaccctcgagaacagagaaggtttttagagaaacatttgtttattttttgccccattgcacactgtgggtgcccaacgttggtctcacagacataagaggaatttacccaccgtgtctgtcctttccctccctgcaactaaatctcttaaaggaagcaaactcagcgtcgaaggattgaaaaccctgctgtggcagaagagataaggataattacttccatctttccctttaccagttttcagaatagctagttgattccctaaaatccttcagaggtgaccagtgagaggttttttttttttcctgctttcttctttttctttttaggtatcacaatgactcacagatttttaacagacaatgcgtttcaagcaaatacagttattcttcttctgtactgaaatagccccatctttggccaataagagcctcttcaagtttactcctgagtcctttgacatgaccctggtggtctttggtaacttcctttattcttgtgtgataagatgttcttggctcttcttgtgtattttctgtcccaggcttaaaatcggccatttctccaagaaaccctgatactttatttactgacaacaatcttagtgttgctaggttggtcattgtttctaggcttttttcctgtggacagagctgggcaatacttgtccttttctcttataaaaatgaattcatgttaatatttctaactcaaatttatgattacagttttatttaacttacttatttttatttttatctttgtgtcttttttcttatgatgaaaatcttgatcctaacaatagtaatatagttatgtgttccgttttacacacatacacattaaatatatatgtaatatatgattaaaaataacaatataattattgttaacaatatgattactaaaatgtttatgatttctttgctgttctttttgtccttagtgtgtatctcctaaggatgtacaattactgtattctaaagtcgtatgaaataatttctctctgtcattaagccagcaatgaagtacacaattagatacatttgttttgtttgctttcaatttttaggcattgcttgtttcagttttatgttatgtagggatttacattgttccaaagtgaaatcaaaaagcaaacacaagatatattcagagaagtctcacttttgcctttgtttcctctatcctatttcttcccttttcctctacctaacctttttaaaacacctttttggttctccttctattgtttatcttaagaaaaaacaattttattaagatataatttggacttcacaaaatttacccgtcttaagggttcagttcaatgagtttctactaagctgtgcaactgtcaccataatccaggatcagaacattcccagcacccctaaaagatctgtcttcccatttacagtcgttctgcactgccgtgctcagcccaaggcaaccactgatctgctttctgtctctataaaatccagtgccgtcgagttgattccgactcacagtgaccctgtaggacagaagagaattgcccgatagagtttccaaggagcgcttggcgaattccagctgctgaccctttggttcgcagccgtagtacttaaccactacgccaccagggtttcctctgtctctagagatctgccttttctggacagctcatgacagtggaatcattcggcatgtggcttctttcactgagcctacatcagtccttcatccctttttattgctgaatagtactctcttgtatgggtatactgtatattttgcttatccatttagcagttaatgagcatttggattattttcattttttggctattataaatactgatgtgaatattcatgtgctagtcttcgtgtggacctgtgttttcatttctctcaggagtggaattgctgggtgtatggtaagcttatgtttgactttttaagaagttaaactcttttccaaagtggttatacccttttatatcctcactagcaacgcatgaaagttcctgttttttcagatccttgccaacattttttatcatctgtctcttagactatagccattgcagtgggtgtgaaatttacttgcggtttgtttgtaggaaaatgtattctttgagttccacaaatatttactgagtaccagctgtgagcaaggccttaggtacactctgtgggagatacaaaattgaatgggaccagactctagcccactggactttataattcaggggagtgagaagagacatatcataacgttagagaggtttaaagagtgagggagttatggcgcagggagatgaaacacagtaggtactcaataattggtagcagtttgttataattattaatggactttgtaactcccagggctttccacccaacctactgttctctgccctgttaccagttttacagaaaggtttaaacagctctgatctagtccgtcttctgcatgcatgatggctccctgcttttctgtttgctgttttagtgtagctgaatgccttttttttaatcctcttctcatagagggcagccctgctgccagagttacttcccagatgtgattattaattccttttctttcttatttctgaagacttggtgtttgcctatattagctaagtagttgggaatgtggagaaaagtcccctgcttgcaaagcttttggttggctaataaaggatatattgggcttctatcctccttgtcttgcctcaggttgtgatatatctcttgctagttgtccatcattgtagttttctggtcttttactattgagcatctgttcgctgtgcccacccagaacccatgctgtataaagccaaacagaaatgcagagaactatcacatgttaggggaacagcaaaatggtcatcatagtcaatctctgttagtggtactaataaagcagagcagtgatacagatataggtagaggtggcggtagtcatctccagggcgtgttcgtgtgacggagaggctggttccagattaaaaacttcgctattactgatgagacggatgtttatggtttctaaagtgctttgacacatattaaagcattatgtgctaaaagagctaaatggttcagagtttggttttttttccttaattttaacatgagcttttagttatgaaaatttcaagtacttggaatagtatggaaaattttataacagattctgtgcgtgtacgccccttcaagattaaacagatgtaatatatttgttatgtttattcagggttttctctctctcccactcttttctctttcaagaaataaaacatttcagacacagctaacttttcttcctcctgccccaccaagaaaacactatcctgaagttgatgtacatcacccttgtgtatgttttttacctttatgacagctgagatattcataaaaacgtgttgttttgtatgtttttatatttgacacaaataatacattttatatatccttttttttaattcaactttgttttcagggtttatccaagttgataaaagaagatcagatttgttcattttaactgatttatgtagagtgcaataagagcagtgtcccctgcagtcatacaatccagctattatttgcagtatattatttctttgtgcaaagaagtcattctttgctgcagggcacgtctgtgtacaggtgtccttttgcacataggaatgaaggttttttggacagatatctggaatggaattgttgggttttacgcttttattcaacatcactgtatttttcagattgctttcaaaagtgattgacttagaatattatgttagataacacttagtactatttgacatattacatgtttacttgtttgtttattttctgtccggctccctgcactcagatgtaagccaaacaatgggaggcattttttctttcctgctctctcctataattttcagtgctaggaacattgcttggcatagaataggtactcaataaatgtttgttaagtgaatgaatttgatcttctcaaagctgtgagggtagggagactagggaaataggctgtgatgtctgttttccttgcacccattgtttaaatgaggaaactggaacaggaaccaactgacttttttgggtcacacatcctcataacaataggattccttggctcttgtttttacccaagcctcttttaaggtatatgttaggatttgtaatttttgagaaagatattaaaagtttttgatagactctgacaaaattagttttccaactcttaaatgtttgttaaatactagtgtatgtctagcactatgctagtttttaacaaactagttgaatttgtgaaagacagcataacataccaccacttgtctgtaaatttgctgtattgtggtggcttgtgtgttgctgtgatgctggaagctatgccaccagtatttcaaataccagcaaggtcatctatggtggacaggtttcagtggagcttccagactaagacagaatagaaacaatctacttctgaaaaaaattggccagtgaaaaccttaggaatagcagcgaaacattgcctgacatagtgccagaagatgagcccttcaggttggaaggcactcgaaatacaactggggaagaagctgcctcctcaaaatagagttgaccttaatgacatggatggagtcaagctttcaggaccttcatttgctgatgtggcacaactcaaaatgagaacacacagctgcaaacatccattgataatcggaatgtggtatgtacgaagtgtgaatctaggaaaattggaagccatcaaaaattaaatggaatgcataaagatcaatatcctagacattagtgagctgaaatggactggtattggccattttgaattgggcaatcatatggttgtctatgcaggtaatgacagcttgaagaagaatggtgttgcattcattgtcaaaaaagaacatatagtgctgtcactgataggataatatccatacacctacaaggaagaccagttaatgtgactattactgaaatttacgcatcaaccactaaggccaaaaatgaagaaattgaagattttgaccaacttctgcagtccaaaattgatcaaacatgcaatcaagatgcattgataattatcggtgactggaatgttaaagttggaaacaaagaaagatcaatagttggaaaatatggcctttggtgatagaaatgatgccggagatagcacgatagaattttacaagaccaaagactttttcattacaaataccataattcaacaacataaatgatgagtacacatgtgaacctttgccaggtggcatacacaggaataaaattgactacatctgtggaaagagacgatggagaagctcagtatcatcagtcagaagaaggccaggggttgactatggaacagaccattaattgttcatatgcaagttcaagttgaagctaaagaaaattgaaacaaggccatgacagccaaagtacaaccttgagtatatcccacctgaatttatagagaccatctcaagaatagatttgatgcattgaacactaatgaccaaagaccagatgatttgtgtgggatgacatcaaggacaccatacatgaagaaagcaaaaggttgttaaaaagacaggaaagaaaatggatgtcagaagagacactgaaccttgctcttgaacttagagtagcaacttgcacttgcccttagagtaggtaatgtgaatggaagaaatgacataaaagagctgaacaggagatttcaaagggcagttagagaagacaaaagtaaaacactataatgaaatatgcaaagacctggagttagaaaaccaaaagggaagaacatgcttgacatttctaaagctgaaagaactgaagaaaaaaaaaaaaaatttctagcctcgagttgcaatattgaaggattctatcggcaaataagaagtactcagcatcaggattggaggaagactcattaacaacctataatattcaggtgacacaaccttgcatgctgaaagtgaagacttgaagcacttactgaggaaggtcaaagattacagccttcagtatggattatacctcaacatataaaaagagcaaaaatcctcacaactagatcaataagcaacagcatgataagcagagaaaagactgaagttgtcaaagatttcattttacttgggtccacaatcactgcccatggaagcagcagtcaagagatcaaatgacatatggcattgggaaaatctgccgcaaaaggcttctttaaagtgttaaaagcaaagatgtcaccttgaggactaaggtgcgcctgacccaagccatggtactttctcaatcacctcatatatatgtgagagctggacaatgaataaggaaaaccaaagagaattgatgcctttgaattatggtgttggtgaagaatataccatggatataccatggactgtaagaagaatgaacaaatctgtcttgaaagaagtacagccaaactgctccttagaaccgatgatggtgagacttggtctcgtgtactttgaacatgttatcaggagggaccagtctctggagaaagacatcatgcttggtaaagtagagggtcagcgaaaaagcggaagaccctcaatgagacggatcaacacagtggctgcaacaatgggctgaaacatggcaacaattgtgagaattatatggactaggcactgtttcattctgttgtacacagtgtctctatgagtcagaacaggcttgaggacaactaacaacaacaacaacaacaacctaagcaaaatcttgaacaacgcaggaagcatcaaaagaagatggaaggagtacacagagtcactgtaccaaaaacagttggtcaaccttcagccttttcaagaggtagcatatgatcaagagccaatagtattgaaggaagaagtcctagctgcactgaaggcattggcaaaaaacaagacttcaggaattggtggaataccagttgagatgtttcaacaaatgggtgcattgctggaggcactcactcatctatgccaagaatttggaagacagttacctggccaaccaactgaaagagatccctattcatgcccattccaaagaaaggtgatccaataaaatgtaggatttatcaaacagtatcattaatatcacctgaaataacatcgtgattaaaagtctcagagttaaggctgagccaagatggtggcttagtcacacacaccgtaatgtcttcctgcaccaaagatccagtaaaataagcaaaatgggaatagataacaatccaggaaccccaaacatcaaaaaaagaaggtctaaggactgaactgaacactgactaaaaggaaaaagtgagtgaatgcagtgaaagaggagtaataaggaacggaggagctcagccagccatcctggatcgacatggccatcttaggacaaagccaggagtgaccctgggtgaagaaaatagcaagggaacttcacaactttcccagaagggacagagaaactctgtagacatgcatggaaagaagcagaggcagggcgggagccaggatccagaactggagatactcaggagtggtagccccagacctctggggtgagagcactcatgagacggtgaacccgcagagtgtcagtggaactttcctacccaaacggtgactgggcagccctccccgcacacacccgacaggagacagcttctgctcgctagctgtagctgctgcaagttgcgccggcacccatgaccttagccagagggacacattccctctcaccctatcctcctgatcagaggtgacagagagtcccatacccaagccacttcggctgaccagaggactacaacacaagcatttcctcttacccccatctcaccaaccctgtctgctactcctcgttgcccacccagtgagcgagactatgctcacccctgtgcgcatacgcacctatcatctataccccctccaagggaccggtggggtgcagtggtggcaagacagtgagagagctcacttgctgctgtctctgctttcccctcacctggtgaggggtggaggagacgcaatatgtgtgtacccctctgctgccctattctccctccccctgcccaacatgaggcagaggtgacacgattgtgcatgcatttgcccgggacgacttctgcccttagcccatccagtgtgggacagaggagtagcaactgcatgtgcatcccgcctgaggccctttcctctctccccctgcccagtgcaaggcagaagtggagcgagtgcatgtgcatatgcccactgcaccttcttcctcttgccacccatcgatgggtgtagtgtgactgagcgaacatcctcgtgccgtttcctcctcccttctcccacccaggaggaggccaaaggagagtgaccgcacatatgtcctccagccgccccctctctaccaaccataccccccccaagtggcaagaggtgatgaccaagcccccacttgtccaccccacccccacactggtcattctacctgcaaggagatcaccactccccactcctgtgctactgaaccgaagacaaatggaagccaaaacctgaccagctcacccagtcacccccacaagaccagtaaacagagactcaagctcccacacctatccaccatcctgcttgcccagagacaggtagggagtgctccagcatgatcagtccaatgactagagtaccataccagccatgtctgccaggaatcatcagagcagaacaagaaaacaggacccaacaaatatttatacaattaaaaagtacaataacctcttaatgccccggtgacaacagccattagcaaaccacctaaagaagcagggcaagatggcctgagcaagtgatcgacataaagaaccataaaacctccctgaggaagagaagataatggagcttcctgtaaggaattcaaaagacttatgtatatggtcctcaaaggaatcaaggaaaacacaggcaaaactatgggaaacatagacaacaccaaggaaagcacagacaaaatgctagaagaattcagaaaaacagtacaaaaacaaaatgacaaaatggacaattggaaaccatataaaaacagcaactagaaatgcagacacttcacaataaaatttcagaaatagacaacttagtggaaaattgtcagagtagaatcgcaacaatggaagacaggatcagcaaaatagaagacacatccactggcactaatctgtttgaggaacaattaaaaaaaaaaaaagaatgaagaaagcctaagagttttgtgggacaccatcatgagaaataacttacacatgatcagaatcccagaagaggaggagtcaacagaaagcacagagaattgttgaagatttgctgacagaaaacttccctaatatcatgaaagatgagaagataaccatccaagaagcacaaggaaccccatacaggatagatcccaaaagaagaatgctgatacatatcataatcaaactttccaaaaccgaggacaaagaaggaaccctgaaaccagttcgggaaaagcgaaagaccacctatggagaagcatcgctaagactaaactctgattactcggcagaaaccatgcaggcaagaaggcaatgggatgatgtatataaaccttgaaagaaaaaaaccctgccaaaccaagaattatatacccagcaaaattatccctcaaatacaatggtgaaattgggacatttccagataaacagaaattaagggaattggtaaaaaccagaccaaactttacaagaaatgttaaagggagtcctttggatagagaaccaacaacatcagacaacaacttgggattaggacacaggacagatcaaccagataccaacccagataaagacttgccaacaataaaacaaagctaaaagactgaaaacagggaatcagaggtgtcagtatataaatgatgataatgttaaaattaaaaaggaataaacgatgtagttatacaactttcatatggtaaggaaggcaaggcaatatcaagaaataaaagactggtttaaatttaggaagataaaggtaaatttcaaggtaaccacaaagaaagttaacaaacctacccatcaaaataaaaaagaaaaacatgaagactcagtaaacacaaaatcaacaataattaaagaaacgaaaattctcaagcaaaaagaactcagcacagaaaattaaatagaacaaagaaactgtcaacaccacaaaaaaaaagtccaacaaaacgacagcagtaaactcatacctatctataatcacgctgaatgtaaatggcttaaatgcaccagtaaagaaataaagagtggcgggatggattaaaaaaatacaaccaatcaatatgctgtctacaaaagacacaccttagataaagacataaactaaaactcaaaagatagaagaaatatatcaaacaaacaataaccaaaaaaagaggaggaaggacaatattaatctctgataaaatagactttaaagcaaaacccaccataagagataaggaagcacattatataatgattaaagggttagtccaccaagaggacataactataataaatatatacaaactcaatgacagagctccaaaatatataaatcaaactctaatagcactggaaagagaaatagatacttccacaataagacaaggggactttaacacaccattctcagtgaagggcagaacaactagaaaggaactcaacaaagacatagaagatctaaataccacaattaaccaactcgaccttatagacatgtacagaacacttcacccaacagcagtgaagtacacattcttcttcagtgctcatggatcattctccagaatagatcacactttaggccacaaagcaagtctcaacaaattcaaaaacattgaaataatacaaagcatcttctctgatcacaatgctctaaaagtagaaatcaataacaggaagagcaaggaaaaaaaatctaatccatggaagctaaataacagcctgcttaaaaactactggttagtagaagaaatcaaagatagaattaaaaaattcctagaatcaagtgagaatgaaaacaacataccaaaacctttgggacacagcaaaagcagtgctcagaggtcaatttatagcaataaaagcacaaatcaaaaaagaagaaagggcaaaaatcaaaacattaaccatacaattcgaacaattagaaagagagcagcaaaagaagcccacagttgctagaagaaatgaaataataaaaattagagcagaaaaaatgaaacggagaacaggaaaacaatagtcaacaagactaaaagctggttctttgaaagaatcaataaaatcgacaaaccactggccagactgacaaaagaaaaatagaggaagatgcaaataacccaaataagaaatgagatgggtgacataacagcagaaccaactgaaataaaaaggatcataacgaaatactacgaaaagttgtactgcaataaacttgaaaaactagaggaaatggacaaatttccagaaacacactacctacctacctacactacctacctaaactaactaaatgagatttaaaaaaaatttgaatagacccgtaacaaaagaagaaatggaagggatcaaaaaaacaaaaacaaaaaagataaaaagctacagcccagatgacttcagtggagaattccaccaaactttcagagaagagttgacaccaattctactcacactattccaaaacatagaaaaggaagtaatactcccgaattcattctatgaagccagcacaaccctgatacaggcaaagacaacactcaaaaagaaaactacagactaatatccctcatgaatactgacacaaaaattctcaagaaagtcctagtcaatagaattcaaaagcacatcaaagagtaataacaacatgaccaagtaggatttatacctggcatgcaaggatggttcagcattagaaaatcaatcagtataatccactacataaataaaacaaaggaaaagaatcagacaattatctcaatcattgcagaaaaggcattccataaagtcctacagccattcctgataaaaactctgagcaaaatagaaatagaaaggaaattcctcaacacagtaaagaatttatacaaaaccaacagccaatattatcctcagtggagagagcctcaaagcattttccttgagaactggaaccagacaaggatgccctttatcaccactcttattcaacattgtattggaagtcctagcaagagcaataaggcaagaaaaggaaataaagggcacctgtattggtttttatattggtaaggaagaagtaaaactatccatttttgcagatgatatgatcctatatgtagaaaatcccaaagtttccacaagaaagctactgaagttatagaaggattcagcaaagtggcgggatacaagatcagcgtacaaaaatcagtcggattctcctacatcaacaaagaggactttggaaaggaattcagggaaatctgtaccatttacaacagccccccaaattagaaaatacttaggaataaatctaaccaggtacgtaaaagacttatacaaaacattactgtaagaaaccaaaagagatctgcataaatggaaaaacataccatgctcttggataggaggacttaatggtgtgaaaatggtctgtactacccaaagtaatatatagatatattgcaatcccaatccaaattccagcagcattcttcaacaagatggaaaaactaatcactagcttgatatggaagggaaagaggctccaattaagtaaggcgttattcaagaaaaagaataatgtagaaggccttattatgatacgttatctcagaacctactgtgcagccatggtagtcaaaacagcctggtactgctatacaacaatggacacatagactgatggaacagaattgagaacccagacataaatccatccatctacagacagctgatcttcaacaatggaccaaggtctattaaatggggaagagattgtctcttcaacaaatcatgctggcaaaactggatatctatctgtagaaaaatgaaacaggaccggtacctcacagtatgcacaaaaactaatgcaaaatggatcaaagacctaaatataaaatctaatactgtaaagatcatgaaggaaaaaatagggacaatgctaagggccctaatatatatatatggcataaatagaataccaaacataactaaaaatgcacatacagcagaagatgaattagataaatgggacctcctaaaaattaaacatgcttaactgaagacttctcccatagagtaaaaagagaacttacagactggggaaaaaattttagctacaacatatctgacaaggggctaatctctaaaatttacagaaaacttcaacacctcaacaacaaaaaaagacaagtaaattaaaaaacgggcaaagaatatgaacagacacttctccaaagaaggcattaatgctgctaacaaacttatgaagaaatgcttaaaatcattagccattaaaaagatgcaaatcaaaactacaataagtatcatttcaccccaacattactagcactaattaaaaaaacagaaaataacaaatgttggcaaggttatggggaaactggaagtcttatacactgctggtggtaatgtaaaatggtacatgcactatggaaaatggtatggcgcttctttaaaaagctagaaatagaaataccataaaatccagcaatcccactcctaggtatataccttaaagaactaagagccatgacacaaatagacatacgcacactcatgttcatcacagcattattcacaatagcaaaaacgtggaaacaactgaagtgcccatcagcagatgaatggattaaactctagtacgtacacatgatggaatactatgcaactataaagaataatgacaaatccgtgaaacatctcacaacatggataaatttggaggatataatgctgagtgaagtaagtcaatcacaaaaggacaaatattgtatgagacctctattataaagtaacaacgaaaggtttatacacagaagaaaaaaaataacattgtttgatggttaccagggatgggagggtgagggaatagatagtaaacacgtgttaatatttgtgaagggagatagacaatagatatgtggtaactttggtaaagggtaagacagtatatgagaagaagaaaaaaatatttgtgaagggaaaggcaatacacaatatgggagaaatcagcacagcatgaccaaggcaagagaggaacgcaggaataaagaataactgtagtaactactggaaaccctggtggcgtagtggttaagtgctgcggctgctaaccagagggtcggctgttcgaatcctccaggcgctccttggaaactctatggggcagttctactgtgttgtatagggtcactatgagtcggaatcgactcgacggcgcgaggattggtttggtttttttatagtagctactacagcatagacaatcctgcggcaatagtattaacaaacaataatttaggaatggatacataggtagaagatatgccaggaggtgtgggagggtgtaagaaagcacaagcaccaggttgtgtggtggatatttctatatgtgactggaggttctcctcatgtattaatatagacaatagagcacacaagtggcacagtcagggagagctcttagacttaaccaaacacttcaagggacgaagttcctaggatcaaaggcaaaggaccatagactggggggaaatctatgtcaattggcacaatgtagttcataaagacagtgttccacatcctactttgataacgtctggggtcttaaaagattgcaagcggcaaactgagatacaactattggtctcttccagtccatagcaaaggagagtggaaaaaaaaaaacagactcaagggagcaattagtccaaaggactgatggaccgcatgaaccacagcccacctgaccctgggaccagaagaactagatggtgtccagcttctattactgaccgctcttgactgggatcacaacagagggtcctggacagcgtgggaggaaaaaagtagaacaaaaaattaaattcacaaagaggactagacttactggacttgaaagagaatggaggaacccctgaaactatggcagtaagacacccttctgacctggaactgaagctgtttctggaaatcaccctccagccaaacaatagacaagcccataaaataaacactaacactcagagagggacgtgcttcttagaacaatcaattatatgagatcaaaagggcaatatttgcccctaagcaaagatgagaaggcaggaaggggaacccagggtggaaatggggagagtgctgacacattgtgggaaatgaagccaaggccatgaaacattttatgtataaactatccaatggaaatctgatttgctctgtaaacttttatctaatgcacacacacgcacgcaccaacacacacaaaacctcttagagttaaacagaagctcatgttctggttttgccgctttccagtggtgttaccttgggcagattaatctgctttattgaacagaggtttcttcatttaaaaaaaaaaaaaaaaaaaaattttttttttttttcagggaattcagataaaggggtgatcttcactgagtagacttagggtgtacatttttgtgtactctatggcacttagcacttggcatatatagatgaagcaccatttatgtttgtggaataaatgaatgaactctttgagcttggaattttggctgtctctgtatagtttgaatctaccagccactccttggaaaacctgtggggtagttctcctctgtcctatagagttgctaagatactaacggggttttttttttggtataggtgggagacctatggacagtaaacagttaactagaaaaagccaaaggagaagctgtgaagagtagggagaccttaaaagtctgtttcctcagaaggcagcagaagtgttaagagctcaggctagatgagaaaaaggtccagatgaaagtcattgtgatcagagttaacttagtaaaatagtggaagcagtccctaagaaggaaaaacaagcacccaaactttggaccttggagtaaatatactctccttagggttttgggttggtttagggcctagtcaagaaaaagtatatcacggcccttggagggtgggtctcataccttttagctccaggttgcctgtaataaataggaagaaaagggatttactgtagactaggcactgagccaagtactttatagacattatcttattaatcctctcaccagatcttttgagtattagtatccagaagttagttaagttacttagctaatagttaacagagctgggatgtgaacctaggtccaccttccggaaatctctgctcctttccaagaccagatttcctctggagcagaaggaaacgaaggcctgatttgcccgatgtatacggaagtttaaaagagaaaaggctcacagaagtaaatatgcagggttccgtcaggcttttcaaagaaacccccacagcagtagcaatcatattaagcagctgtctctcttgcccctgagtagaccaatttcaggaatttggtttgcttgtatttcatgagtaaaaacagtgggtcaaggccagcccttagggtgtacaacttaaaaatgccatggttccagttctttctgttggaggagtgaaggcccagtgtctgtctgcctagagaacttcacattgcggtgtcagatttttttgcttttaaaatgatttcctgaagtctgattgaatttctctcctgtcccctctcttcttgtttttactgtggtttataatggccataagatggtgctgcaactttgcagtcagctttaaaaaaagacttaggagagaaacacttattgcagttaggcagatggggcatcagtggtagggtcgcacaataggctgtgtaggagctgtcactttggggcttctttttactttccctttaaaaaaaaatttttttttttttaatgtggtgaaatatgtataacaaagcaccatttcaaccaccatactttccttttgtggagggaatttttaggtctccaataaggtgggtaggactggtgcaagacttcagggcttacatagagtcaggcaggctacttctccatctgttgcacgaccttttggtatagaataaataaacagatgcaacagggaagaaacatgtaacatgctttcttcattgcctttcagagccctttgggttggtgttatctcatctgtcagatacgttactaaactggggcgggatgacttctgaatcgactttttgaatttgtaattcagacttcctgccctactatagtttgagtaaagcacctgggcctcattttggcagcttccgcttacttccaaacggcagcagtctctgagtcccaggtccaggcaagactagttgccaactcagaacagtgggagatcttcctgttttctcagctaagagtggatttacgccttagtgcagctggaaggcagcacaacatagtgattaaaagtcttagagttaaacagaagttcacgtcctggctctgccgtgtgcttgctatctgtgttaccttgggcaaatgaatcagtgttcttaaactgagcagcttcttcatctgtaaaatgtgaaataatacttttggcctcatatggttactgggggaattaaatgagataatccatacaagtagtttagcacagtgtttggcatgtaaaatgtgccagaaaacgttagtagcagcagcagtaattgctggtgagcattgtgtcaactatcgttcagtggagatctgcttctctcatggatttggacgtgctgttttgttgtttgttttgctaagcctccatttactatactcaaaactgatttctgggtttttcctctgtgtgtcattggccagcagaattaatagagcttttttttttttttttcccaaagggaaatacatacttacaggaggttcaatctctttaaaacctgtgttctttttcttaactgtgaggagtagaatctggtctttttccaggtttataatttgcttaaagtaattttattgtagtatgatctaaaaaaattgagaacatgtatatcttgcttgatattttcttttggacatcttcctgcaacaatcgaaatctatttcatttatagtttggggccataaatgtagcttcccagccctggctcttcttggccccttcccttcccttgctggtactagcctagctggtttgctttttctctctttgatattgttctcctcctccttcattctcgttcgttaccttttcccatggcctctcttcgtttcccctcccttttccatttactctcacattcccgccctccctcctaaccctccctgattcctcccctcccctggtttctagctcctttttgctttctgtttgtgttactgagggcagtgctccaattacctcatatttggagagaggaagctgcagccaatccggtttctgtctgcttttaggtcaagtgatttctgaactgcagtgagatgctttgaatttgtcttcttgcagctctgagcctgtaagatggctgtctgaatcggcagcggctagaagagacagaaagaggtggggagggagggagaaagaattggagggattgccgccggcatagtgcatgtttttatgtggctctaatccgatgaatagcggcagtggtggagtgggaatccgatgaagccaaggttggggtttctctgggatcacaggactggtttagccgcgtttttgctgagattaagagctgaaagacatgggaaattcactaggctgtgttaaggagccgaaagagtcaatagctattcctgagaaggctcccatatctcctaagaaaagggttcggttcaaaaggaagtggagggggaagaaaacctccactccagaggcatctcatgaggaagaacctttggaagggactggagccactgaagagactgaaaccttaaagaagttaacagtgagtctcggaaaggaggaaggagtgggaggggtagagcatccccccccagacgttttactacctggggactctgcccccaactcaggggtgggggaccacggaatgatcgtgcaggtgaaggagagattccagggggagatccagactgctcaccttttgttaaagaatgagtcatcagttgctggaggggtctgggattccctggaagaggggatgactgttgttgctcacctgctcgataacccagcagaaaggaactgtgagaagtcagtgagccaactggtggaatttccaaggacagcatcctgcagcagcagggctgtgctgctgcctttgcaaggagagactgcagtggagaaagcaaggactcggcttggatttcggagcagcactttgcccaggacagactaccccaccgacagaggaaatcaagaccaactttcagagggcaggagtgtggggggaggatccaggggtatttcaagtacccctcagacaggttcctggattgcaggttgttctgtttcctcatcactactggaccagtcgggaggccaaagacgtgcagagcctgcccatgtgggtcaggtgccctcccagggtcccaggctgcctacttctcagagtgatttatccatcagtggcatgactgtgagcattttgccctcctcttctggctatggcagtgatgggccacacttacaggggattcagcctaagaatgtagaacctgaaaagagctccacatctttctcagaagaggatggcactctttctttggaggcaagccacaccccatcatggggtctggaggaggtaggtgggcatgttcacgggataatcaaacagctgattggagtcctggccttcaaacttattaaaatgtggtgtggtgagcagtgaagatttttggtgcttcttcccaaactcatccctatgtcaggtactatgagttagtgactgctctgttggggcaagcagagtctatttcagatctgtcccttgatgcttgaaacgaagctttgttgtccctggggaagttctgattctgagtaaccaagtggcataattgctcgagctatctggtggggttatctctcaaggtgcagtgttagatagtacttactctcaggtctgtttaccagcttccctgcaacaagaagatgtgatgtagcacaaaggatgatggggaggcctaactgaatctctgaaatgagtgtggaagggctgagggatgttgaagcgctgggagtgaggcagctgtcttcagtgcttctccgctggagggtggtgttcttactagcgatgatgaatcccactcctgcagggggacttctaatgacagctctcattcagtacttgtataggtggagagtgcttatccttctttggttttctcagtgttccatcattaaaggagaggggcacagagttatctggagtcagggagattagggcagttggtaaggttccaggttttttttttttaaagtttgttttgtagttggactttttgagggctttaacatgtttttgttcatgaaattgtgattatatatagatacacatacctgagtgtgtatatatatatgtgtatgtgtttatatatatgtatatgtggtggtgatgagttttgtgaatcattttaagggtccagagcaagtgagaattcaaaagatgaggaggtggactcagcaggaccctgggtagaacagggcctggcatgtaggtgtgtgattgaagttagaattcaccgatgggtgaagaacttctgttggcatgtcagcctcggcggcagaagaaataaaaactttaggatatcggagctgcaaggggtggaagacaaagtagggcagacactgcttccctaggctggtacaatacagctgataccacacagcttccctgatatgcagagcagggatgtggccagcctactggtgcgaggcttatcatcgatagcatgaggccagggatagacacaaattttaagatgacctgtgcttaaaatctcctctttcgggaggaatttcccccatggataggcccatcctagtgccctctgttattacagagtttggagattgcctgcagctggagaggagagtggcccttagaaaatatctgctgtgtggttgggcaagaagctgcttgggcttttccacataaaaatgtgtgtgtgcgtatgttatggtaggaagaaagcagtggggctcctggggtgtacaggtatttggatatcactggatacgagaggatgtcaaagttactgcactgcattaaagtggaccttgtggagacatcagattattataggataagtgctcataattggacatgagattttcagaaagtttggagtgtgaacttcaggaacttctggtagaaatcagttctaggtaacggatcatgggtgacaatggcacttttagtatgggctggatctccacactgggaatggaaggttctgcataactctgtaaagagtctcaaaaaaaaaaaaaaaaaagattggtaggagaaacctttggatcatgatctgaagtttgacggtattgagggcggtgtgagactgttgcttttcagtatgtgactcagattgacctgtgacatttctgggaaaccaacctttatatcctatcccttttccccgtcagcgcagacacagccagactactcagttgtagccaaggctgaaaaactaagtgattgacgattagacaagtttctaggctctgtgtccattgtgtgatgtagggaccacagactgaccatcccatatgacagataagtaatgtatcaaggtatgtggagatcctttcagattgaaagtctttgaggccaaggtgcctggaaccctcattagtctcttcaggaagctgctccttcactagcaagctactcgcaaggccttgaggacagaagggacagaaagacaggacaatgtgttttgacactgtggccttgtgtgaaatgcgagttgagaatcaagactagagcatgtgataagagcaggggcgtctgtgactgtgggagcactgggaggacacgggtcagaaggggagcagctgctgctaatcacacactaaagaggcacatgagaccctcctgagaggagacagcttagagcccaatatagttgatttttgttttgttttgtttttaatatgtcagagcagtaaccctcctcagaaaataactcaagagctccagagtgatgtctgcccttgacataactcaggcccccttgatctctactgttagtgaatccagggaatgttggtgggagtggacccggctatggctagacataaactttgcagagggttttgcttcttttcaggatagacagaaaaaggcactgattctgagtcttgctgagtgtggggcttagatgatagaagataaatggtctgcttttctattcatctggtatggttatttctcttgtcaggaaatagttaacaaagaagcagggtgatgggccagcttacaaaaaatggttttcagaataataagtagactaggatttggaaccagatggcaacaggttaatagcgattgtactttgatgtcagacagaggccttctctggcccatcccttctcttaggaggactccccagtcccagctgccatcaatatccatttattcaaacaaggaaaattgttgaaatccttttctcctctctgtcttggctcccaactcaaatctcttgcccactcttttagtggttcctgttcagtgaagaatttgactctatgccagtgatcttgccacaaacgcttagagtccctgcaatttcgggtgaacagataacattgggggctagaaacgataagaaaaagatcagttggcatgttattttctgggctcagccttttcagtttcaatattcactacttgactttaccatttctcatctttaattatagggagagttgttttactaatattggctttgtattgcaagaaggaaggaaaattaactagatgatgctataagagaaatgtagcaagttaaagttacagttagagctttgtttcaagagattttttttttcaaaaaattttactgaattaaaaattgaattggtaaagaatcattacttttttttaggtgtaatagttgtatatttatgttaaaaaaagagttatcttttatagatacatactgaaatatttatggaggaaatggtatgtgtgggatttgcttctaataacaggggagggataaacccactgacccactgctgtcgaatcaattccaactcatagcgaccctataggacagagtagaactgtctcatagggtttccaaggctataaatcttacagaagcagactgccacatctttctctcaaagagctgctggtgagttcgaaccacttaccttttggttagcagctgagcacttcaaccactacatcatcagggctccttaggggaggaataaagtcagtggaatatagatgaaacaggactggctgtgagttgataggagttcctgggtaatgcaaactgttaatatgctcagcagttaactgaaaggttgggggtttgagacactgagaggtgcttcagaagaaacgcctggagatgtacttccaaaaaattagccactgaaaaccctatggagcacagttttactctgacacacatggggttgccatgagttggaatcaacttggcagcatctggttatgagttgataatggctgaaactgggtgatgagtacataggggttcttcataccattctgtctactatgtatgtatttgaaattttccatttcaaatggaaaattaagaataatgataaaattattatataatgcatatactgacaaaggattaataatcagaatatatgaagggtatataggtgaagtgattaagaatatggagccagattggctgggcttgaatcccagctctactgtttactagctctataccatggggcatgttacttaacttctctgtgccacaattttctcatttgtaaatttacgataagaattgtatatactttgtaggcttgttgtgagaattacgagttaatacaagtgaagcacaataaatattagttattagtattattttagggggcacttgtggcacagtggttaagcacttggttgctaatcaaaaggtctaacccaccagctgccctgtgggagaaagatgtggtagttggcttccctaaagattacagccttggaaaccctatggggcagctcttctctgtcctatagggtcggtatgagtttgaatcatctagacaagcaatgagttttctttttttaaaatattatttcaagaatccctataaataaacaagaaaaagataagtaatggaaaaataacggaaagcccagaaataagcagttcaccaaaagggaaaccgaaaagcccaatacacatgagaagactctttctcactactaatcagggaaataaaaataaaaatgacaataagataccattttatacccatcagattgggtataaaataccaaatgtagatgacgatacagagtgataggaaaacctcttcataccctgttggtggaaatataaatctgtactgttacttggagaatagttggccagtatataatagaattgaaaaatgctcatattctataatctaggatttctattctagttatattccctagggagatgtccaagactgaactgaatactgttaggagcatcccctgaaatttacccaaccctgatgttggtaataaacatttgttttacctccttatagttctgttcaaacgactgcctcttggtctatgtacaggttctgtataagcacaattaggtgttctggaattcctctgttccatgttatctgcaattgttatgatccgcaatgcctttgcatagttagtaaaacacaggtgtaaacagaattctggtattctctgctttcagccaggattcatctgacatcagcaacgatatacctcgttccatgtcctcttctgaatccggcttgaatttctggtaattccctgttcagtgtactgctgcaaccacttttgaattatcttcagcaaaattttacttgcatgtggtattaatatcgctcaataatttccacattcagttggatcacctttctttggaatgggtacaaatacggatctctttcagtgggttggccaggtagctatcttccaaatttctcagcatagaccactgagtgtttccagcattgtatctgtttattgaaacatctcagttgatattccatcaattcctggagccttttttttcaccagtgccttcagtgcagcttggacctcttgatcctatgctacctcctgaaatggtacaaggactctgtgtattccctacatcttcttttgatattttctgagtcattcagtgttttgcccatagaatccttcaactaggggcttgaattttttcttcagttctttcagcacgagaaatgctgggcatgttcttcccttttggttttctaactccaggcctttgtacatgtcatcataatactttacttctttctccagccaccctttgaaatcttctgttcagcttatatgatagtccagttaaaaatggccaataccagttcatttcagctcactaaagcctaggatattgattttcaagagttccatttcatttttgacaacttccagttttcctagattgatactttgtacatcccatcttccagttactaatggatttttatggctgtttttctcttttgagtcgggccacatcagcaaaagaaggccccgaaagctttactctctccgtgtcattaaggtcagctctcctttgaggaggcaactcttccccacttgtattttgaatgtccttcaagcttgaggggcttatcttccggcaatatatcagacagtgttcgctgctactcataaggttttcactggccagttctttcagaagtagatcactaggtcattcttcctagtctctcttagtctggaagctctgctgaaacctgtccaccatgggtgatcctggtggtatttgaaataccagtggcatagcttccagcatcgcagcaacatgcaagccagcacagtacaacaaactgacagacagtggtagtcagcctgttaaccatccactcctattcctgtttcaactcttctcaactttcaatttttgtttgttttcactttctacctggaattctttttctcctttctcttttctaatccgtaacatctttcaaggatgagtttaaatcattcttcaaaaaatctttttgatcacttcagccaacactaattttctgttcttctgagatctatattgcatattgttgtaattagtacttttttttttttacattaaattacgtataactttttcatgtgacttgccacatatgatgaaacataaggtaaggttttttttttttttttcttccagaaattagcgtttagaaaagggagagtctttttgtatttgacttcttctaaagtcttttttgttactgggctctcagtgaggttgtagccagttcatgaaaaaggataaatgaatctcttgtcaccatctccttgcaagctatttggtagaaagtgctagttcaatcaatatgagtttcatttcctctagagatcaattgacattactggctaaagaaaacaaaacaaaaaaatagcccaaaattttaagaaagttttagttactgttcttggaaatatagcctcctaatttgaagtgctgaatgtaactgtgtgcaagccttaatcgtaataaaaacttaaaaaaaatcacatcatttaaaaaaaaaaaaaaaacatggctagtggtcacatacggcaataacaaatatacaccaatagaatgaatgaaaaaaaaaatctaacccaacattaatgcaaatgggctcttatggtttaggatgaaatatttagtaataacatagattcagaaaagtgatggatctcacaaattttagaaagaaatgcagatgatattttccagaaaatttacacaaaaagtagccttattgacaaagacattgatacaaaagttgcgcgtgaagagttttaataacaattttatgaaatataaagatagaaaatcattaataccaaattaatatatttgatataatacttaattttaaatatgtataaataaatttctaaaagcttatatatttaacagggccacaaagcttttcttccctatccgtctcttacttccatccatctgttgtcattcgggaaaaattgggtactgccttatacttggggtagctgtgttttaggcagatatggcatgtcacaattaagttccttcaggacaagcatgtcttatttttttgttttccctttttttctcctgggtaacttctacttatattttaaagttccccctagatgttgctgtctctgagaagtcccatagcgtagctagtgtgacttacatggttacttctgtcgcagcattgatttctctgtatagtaaaccgtcaccccaacaaattgcttgaacttgaggcccgagggtgtgtttttatcttgagataaaatgaactgaaacacagtctagaatatagcgcttgctgaaaaaataaattaactgaatgaatacatgtttggctttctccatggtgcttggcatagtgttaaaacagatgagatgttgttcaataaatacttactgaattaatgaatcattaggagaacatttatgtttctgaaaatgcttcagagaaggaagtaatcaagccttgagggttgaaagagaattcaggtagacatgcatagtctggggtggtgttgaagctgtcttcccgtagcaaatggctttgttgcttaaaacccggatgagggagatagctccctgaaactgaagctgagtttccgcatttgggagattaaggtaagagcttccgcacagcctaaacgacagcactacacacatcatatgtgaatattacatgaagagatgcatgaaagccaaatttaattactgagatgattgtgatgacaattacgtttttctcttccagttcacagtcttagaagggatcctaagccaaacagagtctttttcttttccccaagggatctgaacatttccctgtctccttacagctgtattggaaatctgaagtaaagctgttcattgaattattttcagtgcagtatacagagatactgtgattggcacataggaaatgtcatcagagagattggttctactgggcatacagtattaattaactagcagaaatttattttttgggtaaagaacccaaatactcagatttcagtttgcttactcaggttgcatcccttctcagtgaatctatttccttttcttaccaatgtttttgtcttaatatgtatgtaaagagggtacaatggaagtactgggatatgtcagtggcaggtggcatttagccactggactaggcagatagaaatgttgtttaggggaactgaaataggttgatgctggggaggggccgttttcactggactcagaggatgatggcttgggctccatggcgcattgttgggtattcaactatgcaggtctgtagctcagttttttttggtgtacttggagttgattgggttttaggaggctaactcacattgattatacgtgcaagagattgaagtgaattaatttatgatgtgaattataactgccaaaaggtaagaacgtttgaatcggctgcttagtgcattttctcactgtagggtatttatatgggagcaaataatctgcaggttgttaggtgaacatgaagtcagagccaaaggtggtaggtagagcatagattttcaggttggttttattagttggtatcatcagagtttgatagcctgatttctactgtagaaatgtacctgtgtcaaggaagactaaaaacctggaatctgctggctagggccccatttcacctgcatagacttggaggcaatatttattggctttcctgtcttagaccctatgcaggctacccatactcttttgttcccatagttttcttcagatattttagtaacatttattagcctgtggctttcttttgtacttgataatgtattagttaagatctctgggtggtgcaaatggtttgcactcagctactaaccaaaagttggcagttggaatccagccagtggcactgagaaagaaaggcctggcaatctacttccatagattacagccattgaaacccttatggagtgcatttctactctgacccatatggggtcaccatgatttggaactgatttgacagcagtgggtaaaagtattagttagagttcctgacctttttccccctaattttagtgtcttctcctgatacctaatctcgtctattatgagttgaatttgtgtatttacaattcagagatttggaggtgacttattgttgattgctcccttgtaatgactgtgaccaccaaggaggctaccacttccaagtattgcacctcatagagacaactaagagacagatgttctgtggacagtctcatgccttctctacccaaaaaacctgaagcagaaagtgtgcggagtctatggttttattatgggaaggaaatacatgttcccatttattgaaacatacttaggaaccaagctaggcactttacctacatcgccttgtttaatccttgtagtgaccctatgagaaagttattatctattttaaatatggggaagatgggattcaagaggcttaagtaatttgtttatggttacattcctagtaaatgcttcctttcaaaggcgtatctgtctgactcaaagactttttctttttaataaagattaatttatgtttttcattttaaaagtaatgtgtgcttattatttaaagtctgaaaaatagaaaagtagaaagaaaaaaaagaataatccgtagtcacactccaggagatacaaccattgttaacatcagcccaaacttgtgtgactttacccactgttttgaatttgctaaataagtttgttaccaaacaagcaacctgtctctggatttcgttgtgtaccatcgagtcaattccaactcatagaggtgctgtaggacggagtagaactctcccttagagtttcaaaggctgtaatctttaggaagcgggtggctgcatctttttcccatggagcggctggtgggttcaatccatcagcctgttggttagcagctgagcgctaatcattttaccacctaggagtttcccaaaatattcttatttgtttatttttattacattatttacaagccaagtgattatcagttaaagcatgttaagtctctaccatatgaccaggacagcactaggtgcaatgggcagtatgtgaagggctatgatcactgagtctcagagttggagtttatttcttcatgcacccagcttctgctggaacacatccagtggtgaggagctctccctcatgaggggctgctattcgcttctagatcgttctggttgttaagatgttgtgccagctcctcagaaaacctacagacttggggagataagattaaatgtatgaaataagggccatttatgcaaggtaatatttcattaaatgctgatataaactgtcagtgctgtggaaattggacaagaaataagaaaggccatcacccacaagaggaagatggaagggaactctgttttgcataactctgtgcctgagccagatacttgaaaggaaaatctagttgaattatcacagcaactctggaaaggtagtaggtattatttccgctttgcagatctgataactgagatgcggcttgcagttgtgaagctggaatttggaatgggtgttgcatcaaagatacgcacactcacctcttgtacactgccatctctctaaagtaggtcctgtgctagatcttggggatttcttaaaatagcttttttcttgttactgaaaatgcacagggtgtagaatatttgcaaagtataaaaatcacctgtaatgctaccactcagggatagctagagttaatagtttggtgtatttctgtccagcatttacattcacatacgtatatgcatcatatgtgtaaatgtgcattttgtatatcttttatataaaatcacgattgctatgcatatttatatattgtttgttttttataaaacatgataatcatttttctgtcatgaaaattttctaaagcatacatttttaagtattacaaagaattctttcattttatgtgcaataatttgtaattatttagcccctcatttaaagtttaagctctctgtagttttttgctatgaaatggttaccatattttgataaacattgttatatgaaattccttgcccatatctctgatgatttcctatcaaagtatatatatacatattaagacttttgattaaaagctgccatctagagaagttgtaccatttatactctcaccagtgacagtacatgaggatacccagtactctccctaggagtctctgggtggcacaaatggttgagtgctcaactactaaccaaagagttggtagttcaaatccactcagaggtacctcagaagacaggcctggcaatctatttctgaagggttacagccttgaaaaccctgtggagcacagttttactctgcacacatggggtctccatgagttggaatcgactggatggcaactaaggacagtacttccctattactaagtagtatcatttaaaaaatatctatcctaacttgatgggtagaaaattaccttttatggtttttaattttcattttctttcgttaccaaatagtgtgaacatatattggagttgtcatctaaagtgctgccaaccttgaatttctgtcttctaagaaccatactgcatggagaagacaaaagaatttataccgaattactctgtgtcctttctcttggcagatctctgacatctacattagtggagagtcaggggacatgtcagccaaggagaagctgctcctgtggacccagaaggtgacagctggttacacaggaatcaaatgcaccaacttttcctcctgctggagtgatgggaagatgttcaacgcacttattcaccgatacaggtaaatacagtgggatttcagtgtgcctgaggggctgcttctcttctcttatttgtaattagttataatgccatgtttccctcaaccaagaatcaaggatgattcacttattcatttgaaaaaggaataattattgagctcttgctattctaagtgtagataccaaacccagtgctgtcgagtcgattccgactcatagtgaccctacaggacagagtagaacagatagcagtgaataaaatagcagaagttcttgctctcctggggagactaggcagtaaacaaataaatgtatgctgtctcacagtggtcagtgcaatggaaggatacagagagacagggctttagtactttggacaggatagtcagagacgagttctctgatgaggatgtttgtgcagaactgggagggaatgagccatgcagacctctggggtcagagtgttccggttggaggaaatagcaagtgcaaagggcttgaagcaggggcttgcttggagtggttgaggaacagcaggtggccggagtggggtgggtaaggaagacaaagaaattttgaatgacggaagtcaaaatcattgagctcttaatggtcacaaacacacccaaatttcactctgcagtagtttatgatacttttcccatgaaatctaatgaatctgttgttacataagtttgtaactagggagcactgggtttctggtatgtcactgaaaatggaattagcaccgttttaacctcttggcttttcgtttaactcattcagtgttattcaggttcgggatggtttcagacgcttttcttggtatgaactcatgtttgatgtgtaggtggaagcatttcatgtgcactggtgaacttttacagacctgatctggtagatatggagagggtacaaatccaaagtaaccgagagaatctggagcaggctttcgaagtggcagaaagactgggagtgacccggttactggatgcagaaggtgagagttcataaaacccgagtgagttttggcatgtattcatgattgcttctcctggcaggttcctttgctctaagaaatttcttgtcctttctctctcagatgtggatgtgccatctccagatgaaaagtctgttatcacttacgtgtcttccatttatgatgccttccctaaggtccctgagggcggagaagggatcagtgctacggtaaaagaacatttttctaaaatactttcaaatgttgatttatttggattgattagacagtgtttcttaagcactcattgtatgttgttattgttgtgtgcatttgagtccagttagactcgtagcaaccccatatgtcagagtagaattgccccatagtgtttcctaggctataatctttatggaagcagaccaccaggccttttctcctgtggagcagctcatgggttcaaacctttgatctttcaattagcagtcaagtgcttaactttgcacaaccaagagctcctactcattgtatacagggcaaactgaatccacatcgtctttatcatatatggaatttgtccttagtccctgaaaatgagtctacctgctgtagattttgtagcatctaacacagaccatgcagtactaaatgccagcaaagaacgcccttcccatccctagctataattcaagctgaggcagtggtttttcagcctctaatattagcttgattaagtatctcatagatcttttctgaatatatttagtagcttggtttgtagcctttaagtgtcaggaaattgaatcccatactgtcagcccttggggtgttttgaaactgggactctgagtgttaaactgagccactgtctaaacaattagagggaaggatattatgtggtttcaagtggcctgaactacgttctcctgtgccgttttggatattgctgatcacagaatgtatgatgtttacctctggcaataggaagtggacgccaggtggcaagaataccaaagccgggtggactccctcattccctggatcaaacagcacacaatactgatgtcagataaatctttcccccagaaccctgttgaattaaaggtaaagtcatgggctgaaactatttttataaattcattctagggagtaagcttcagagcttattgctgcttgcttttgggtgaaacagtttgaaaaattgagccctattgcttgcactcattcattcattcaccaaatgttaactttgtaggcactttataaccaatatatacacttcaaagaaacagaaattcttgccaaggagagagaaaaaggaagaatcgaggaattatataaattactagaggtaaggaagcatatcctttgctgagacttgggatttcctgcttttcattattgtcacttctttttaagacagatttcagtgtgtccccttctcaaccagcactaatagcaatactctgtgccagtctttaaaatttggggcaaaggggcagtattaaccatctgtattttttaaaagacctattgaaaagtggtatatgtttattctgaattcttgaaatttgtggatgagttttcctgcttttcagagggaagttaattctcttcttaggataggaagaaaagggatgtccactcacattctgattcctaaaaatgggcatttaaccttcccagagtggacatcactgagaggacaggaggatttataaaaaatgtaggagcggaatgattcagagtagggagtccctgtattttagaggtgatttttcctttttttttttgcttttacctcagtgtgaagtcctaatgcgaaatattcagttgtttctctcttactaacaatgagaaaaactgctgagtggctggataaaaaagtaagaagtgacatacgaagaataaaaactgagactgacggtatggctgtttttgaactgaaagaatgtctctggtttttttaggtgtggattgaatttggccgaattaaactgccccagggttatcaccctaatgatgtggaagaagagtggggaaagctcatcatcgagatgttggagcgagagaaatcacttcggccagctgtagagaggtgggtccagagcctgagggtgatctgacacacacttactgggttgctttgagccccaagcttgaatgatttttttcttattttaggctggaattgctgctacagattgcaaacaaaatccagaatggtgctttgaactgtgaagaaaaactgacactagctaagaatactctgcaggctgtgagtctctgactgttttgtctcacttcttgtatcacatgctttccacttctcatcctctgctctaatagttgaaggtaacagttgaggaattgactgtgttaatgtccttacatcttggaactgcagtgaaaccctgggctccccaagccctagtgggtaggagccatgggagttttcccactcttatccttcctttctgtctcaggatgctgctcacctggaatcaggacaaccagtacagtatgagtcggatgtcgtcatgtacattcaggaatgtgaaggtctcatcaggcagctgcaggtggatctccagatcctacgggatgagaattactatcagctagaagagctggcttttaggtgaggaacaaggaactcaaaaggggaggttggtttcttcctgctaaggcttatgtatcaagagtggattaggaggcaggcactgacttggaggatcttggagctcatttattctaatatgactcggtgggaatactacagacattttggacaggaaaattcctgtggtggaggacagtttccccttattgcaggcccctgataactaaatacctgtgggattccttatgacatcttaacatgcccccacatttcagagtgacctgcagggtgttatcacatctagtctagaaccactggtgattcaaagtactgattttatagaagaggaaaccaagacccagagaggagacaaggattgtttaaagttacacagttagtttttgcagagccaaaactagaacccacatgtgttgactcctaatcctttgtttagtctgttatccacccaggagttatataaataggtattgatttgcttccttccagttaacactgtgatttggcatttgcctcaaagacgactttgaactagatgaagttgttaataatatcaccttgcattcatataacactttcttttttaaacacttctgatatgatctctctctttttccttttttaaccacatccttgtaaaatgaataggaaaaattttatttttaaaagtatgttaaaaatttaagtcctttccttctctcatttcagggttatgcgtttgcaggatgaattggtcaccttgcgtctagagtgcacaaacctgtatcggaagggccacttcactacacttgagttggctccaccatctgctttaaccactactcatctaaaggcagaacctttgagcaagggaacccattcttcttctacctcctggttccgaaaacccatgactcgggctgaacttgtgtctatctcttcctctgaggatgaaggcaatctccgatttgtgtatgaactactgtcttgggtagaggagatgcaggtgggtatatgtccaaaatgtctgtgtagttcacctatgtactgagtctaacagtttgtctaagagggtcaggttgctctgtgtctcttatatgaccaaaaaacccattgctgtcgagtcaatcctgactcatagcaaccctataggacgaattagaactgccccgtagggtttccaaggagcggctgtgtggattcgaactgccgaccttttggttagcacccatagctcttaaccactgtgccaccagggctctgtgctatctgggacctaagccaccttttccttaaatcttaaatggattctcaaaatcccacacagtatggcctaggcattttgaatttgaagccctttgggaatctgttcccttcagctgactgcctatgtgagagcttatgggaaaaataacagagtctataaatttcagttatcttttctgaaatttcttcattggcaaaggagcttatcattcacttttttaaaaaattggtctcaactctttaagcaagtcagctgtgtttcataactccaaggggcactattcacatatattcttggataacagttcaagtttgatgttgtctttcttgtccttctaaccttctaaccctattgctgtgtattaaattcttcccatctgcagatgatggattccccatgcaccagtaaataaaaatgtagaaagacaagctaactgtttaaaaatcatctcccattggccagtagttgatgccatgaatgatgcaaaaatatttagcaatttctgtctttgtctgttttgattgtaaagtagagaagagactctataaagaaaaatatgtattttcagcctgtgaaaaccctttcctagataataaattcaggaatgtattcccataacacagcagcaagagtctgcctctggcaagagtctgcttctgctgcttcttggagatgattgatggcgtatttttctgtaagaggtcatagaatgatggagaatgtttagatgaccgtttgcccaatcttctgcctctaagccacttgcccaaacattgattctgacagttttctttacctgccaactcgatgatgaattattatatttaatttttctttctcagatgaaactggagcgagcagaatggggtaacgacctgcctagtgtggagttgcagctggaaacacagcagcacatccacaccagcgtagaagaactgggctcaagcgtcaaagaggccaggttgtacgaagtgagtggcattcagaacccacatgggagcatacacaatgcagtcatccctatgcagaagggggctccagaaaagaataacccatatactgtatcctatataacaacatattcccttttcacatgaagtgtctgttttttgatctttgaaataaccttgtgagaaaggtatttaattaacccctgtttactaaaaagtaatattgaactctaaggtcaaaattggtatgtttccaaactcaaacctgatgcccgtaaaaattcatgctttttccatttcgtcatctgcctgcaatagagagctgatacagagaaactttatcccctcagtcactcctctgactccctcattctgtcttcccgttttctatttcagtctctccttcaaaaaagcaacctaattagtttgggagtcatcaagcataggttttgcttagaaacccctcagaattgctggaagcatgagatagtgaagtcttatcaattgtgttcaccctgctgaactcttgcccacccagtactgctccatgctataaacttgacccagggatttgttgtctaagcttctgtaaccaatgcttgtctgtgtgcagatataatatttatgtagttgaaaccgtcacatagattcattttagttactcgttctctaatgtattttcatgtcatttctttcttatcagggaaaaatgtcccaaaatttccataccagctatgttgaaactcttgggaagctggaaacacagtattgtaaactgaaggtgagttttgactggctctcttgtgtgctgcccttggagaatttggttccctccaacggcccctttcccccagtttagaagcctcgtggtttggcctggtttggttttctgttcattaggttatatcactgactgtgcagttgttcatatgtattgtaacatttcctgtattttcttaatggatcataaacctctgctccacaaagttttaagtaagtagtacacctcttagcaatcaggcctcaccaaagcagtggctaaacatgcctgagacactcaacaccagaagtttgagattggtaaagggagaacccctcttctatctgttcttcattcctgtccatcaagactgtacagagtagaacaggcctagatcctttgttattcacagagcctcacaaaggcctggtgagttctagcttttagctagaattgaagatggctctaggagtcctatatgcaagtctgatgctttgtgctaaacttgaatccatggagtagtacccagggatagaaacaaaaacctaaaccaaacccattgctgtcaagtcgattcctgactcatagtagccctacaggacagagtggagctgctccatagagtttctgaggagtggttggtggattcaaactgccaacctttttggttagcagccaaatgcttaaccactgcaccactaggactccagggatagaaaagtaaggctaaactcttcagacggggattgcactggagtatgggataggaaatgatactggtgaggagtgagcttcttggatcaggtagacacgtgagactatgtgggcagctcctgtctggatgggagatgagagcgcagagggggtcagaagctggccgaatggacacgaaaatagagagcggaaagaaggagtgtgcttagggggagagcaagctgtatataaatttttgtatgagagacagacttgatttttaaactttcacttaaagcaaataaaaattaaaaaaaaaaaataaggctaaatttatttcttcacttactctttgctttgttatcaaatgtgctgtcttctgcaaatacatggatacagtttaaccttgtaatccttgctttatctaggaaacttctagcttccggatgaggcaccttcagagcctgcataaatttgtctccagagctacagctgagttgatctggttgaatgagaaggaggaggaggaactagcatatgactggagtgacaacaatcccaatatctcagccaagagaaattacttctccgtgagtctagcacaacaagcctatcatgtttatgtaatagcagcagaaggagacagagggctagtctgctgagaacttgggtttctggagttgcactgtgctgggtagacaaggggaccctgcttaatgccttgtttgcatatgagaggaatatatgggaggaggaacagtatagccccagaattaatttatttagaatgcatttagacagtgttttgggtgagtggaacagcaatctgcaagttgagtcattctggaagtaacacagctttttggctaggattacagagtttggagtgaaagatacctaagttcaaattctattcctccgtcaactagctctgtgaccttgagcaagtcatttaatctctctgggcctctataaaatgggataataacaccacttcataggattattgtaaaggttgagtaagatttcataagctaatataggcaaaacacttagcacagggcttggtatataagacgaacttagtagttctgtgatgatgatagttattcatcttgctgttaaaattgttattaatagtattgtttaactagggtttactcttggcttcttacaaattctgagttctgtttaattcatttaataatttttggcctgaattttttcatctgtaaaatgggaagaaaaattctgcattgtacaatgggaaaatgcttttttttacgtttcagtgaaagacatatacaagtaggtggaggttattttttgctgcttttagtacttcccatatctcaaagaatttttaaggattttgtaaacacaatcttaaaaactctatggagcagttctactctgcacacataggaattttttcactaactctttagatacctggtggccaattccattgacttagagttcttaaaaaaatgtaagctttttttggttggcgaatggcatataattctttggaagtaaagaagaaagaatgagtaatatatggataatgtgagaactggaattaggctttataaccaaaaacatcaaggaaaaagggacagaatctgtaaggatcagtgccagcttcacagaagagctggcatttaaattgggtcctctagaatttagagtcaaaggagggcactgcaggctggggaatagtctgaacaaagccagccagtcaggggtactggtctcctggtgtgtcatgtcctgtgtaggtgggtgctgatgccagctagccactccggccagatgatctcctttttctgcctccagtgatcattcaatgtttcctcactgaagtctagctccagccctttgccttttgtgaatcattccccaataattccagcacttttcttctctgaaatcttctggcatgtactttgtgtacatctcattgtgccactgatactgtgttataggctcctttgaggtagaacagggaacagagcttttttttcattattgttgtccctccctgaacagcacttattgcgtaaactttcaggagctgacagtggagctggaggagaagcaggatgtgtttcggtctctccaggatacagcagagctgctgtcacttgagaaccacccagccaagcagactgtggaggtatgtggctgagaatgtgagagtcaagtgctcagaggtgattgttagaaaaatattcaaattgctggctttgttccactgagagacttggagggagtgtcagggatcatttgtcttgggtcttatccctttctacctcacattgttcctgtagcccctcaaagactgcaaacagctttgatagtcttaaggagaacactgagaacagcaggaggagatacattgactccccactttatgaggcaaagtgacctggaccattttctttcaaataactttccagacagatccctctgcttgttggtgtagcacctttaccctgctaaccagagaggtgattgagcaggctaggatgggtttattgatacctgggttttgttaacaagatcatttaacggaagagaacttttctatgtaacctcttctaacaaaaccatgttgagtgaaaagcaggcctctttttcacgggcagtattgagcatataccagtcaagtatctccatgtctcttctgttggcttctctatcattagcagagttgtacttggaagagagcatagcacatacatattgagcctgttaagctcatgcccttctgtctatgcgcttggttcttgcaggcttacagtgctgctgtccagtcccagttacagtggatgaagcagctgtgcttatgtgttgagcagcacgtgaaggagaatactgcttactttcaggtatggtgaactctgtgtgtgtgtgtgtctatctgtgtgcatgtatatgcgtgcatcagggaaggtgaagggaataccctttttcattcaggcaagagattgtgtgtgtatgtgcatgcaaggtgaagattaatcagttagctttcactgtataaaataccaccccaaaacttcgttatttaaaacagttgtttaattagctcctgattttgtgggttggccatttgaccgaggcccagctgaatggttcttctgttcttaactgagctttgtcacagctgcaggcagctggcaggtaggctgaggccgaatggcctccctcacatgtctgacaattgggtggggtgatttgggctcaaggccacgtgtgtttagcatctaataggctagcctaggcttcttcacaatgtggctgcatttctcaagcagcaagtaagagcaagccccagtgcacagacattttatttctgcttctgtcacgtttattaatgtgccattgtccaaagaaagtcatatggccaacctctgatacaagaagaggagaaatagactccacctcttaatggagggtttggaaaatactgtgaccagtcttttttaagctacagtcacatgaaagaatatgcaatttgttttcaggtgacagtggaaggaggaaataagctgttatctctgtgttttttccttaaaccactctccctaatcattttgtaggcaccctggtggcacagtgtttaaagcgcttgcttgccaaccgaaaggtcggcggttcaagccaccaaccattgcgcaagaaaaagacatggcagcctgcttcataaagattacagcctcggaaaccctgtgaggcagttctactctgtcctatagggtggctatgagtcagaatcaacttgactgcagtggatttaatttggcttttggatcattttgtgagcatagcaacgaattgaaacatatttgatcccttgacctctaagcttttcatgaaatatacctcacatctaaatttcacaagtcaagaggaaagagcagttatttctgcggggtgggaagcaagctaacttcttcaggatttagtaggctcttttttttttttaggatttagtaggccctacagtcactataagtgctacggctgctaaccaaggagttagcagttcgaatctgccaggcgctccttggaaactctgtgaggcagttctactctgttctgtaaggtcactatgagttagaatcaactcaatggcagtgggtttggtttcgttttttggatggtagtcaccaaagagccctggtggtgcagtggctaagctgctccgcaggaaagatgtggcaatttgcttccataaagacttacagccttggaaaccctacgcggcagttctactttgtgctataggatcgctatgaattgaaatgaacttaatggcagtgggtttgagtttttttggtggttaaaaaaaaacctgatgctgtcaagtagattctgactcatagcgactctataggacagagtaaaactaccccacagggttttcagggagcaactgctggatttgaactgctgaccttttggtcagcagcctgagctcttaaccactgtgccatcagggctcctttttggtggtggtcaccactaatattttactaatatggcattttgagccctccagtttaaacttctgtggccttcataatgaaccatcactaacccagtggagtataatcatctctgctcagctctgcacagtaagattgttctttcttagttaacatctgtgttgtgatgtattgggcacaatacatcttttccttaaatccccacagttcttcagtgacgcacgagacctggagtcattcttgaagaacctccaagattccatcaaacggaagtattcctgtgaccataacaccagcctgtcccgccttgaggacctgctccaggactccatggtaggtgttgcaacagtggggttgtttacttctgagaagcagagtaaaccatgtgagcagctgctgttaatatccttgaaagctccagggcactgattaatgttataaagtttggctaacattcaaatagagtttaataagtttttgttgtgtccctttctttccttttttcacttctttctttaaagaaactgctaataagattcttttgagtatgttattgaagtaaagggtagtcatctcctcctgagccacttaatgctcaccatactttctttgcattgtctccattttaattcaaaatttggagatgtaaatgaggcgtagcacctgtaaaatagggcagtggggattagcaacatcaaattcttttttattttctcatgcaaaagagaatttaaggaaaaaaaacaatgagatagactcgagtcgaatttttccctgttggtaattttcttttggtaatgatgaggtccttgggaggtgcaaatgaattgtgctcgactactaacctgaaggttggctgttcgaacccacctagtgtctccccagaaggaagccctggcagtctgtttctgtaacgataacagccaagaaaaccctgtggaacagttctactctttaacacaagggttgccatgagttggaattaactcaacagcagcgagcaacaatgatgaggcattagaaattgatttttaatcagtcaaggacaatattaaaatcttaattaggtgtaacataatatttgtccaatttatttatgcagcaatattaactttttgaaaatagattttgcatctagtatttaatccaaatcaattttatatttattttctccaatgaattattgtttagaaatgctggtactaaaatcagcagcaagactatttacatttatttaatgtatattacactaagttggcaagacaggactgaagctacctctcattttaagatagaagtgtgtatatagggaaattaacttttcctatgtgagaaaccaagagaacctccagatcatttcaatagaaatttcttaataagagaacgagaataatccaaaacagtgtcattttttggtgggtgagatttgggcatttgtgaacattagttggttttttttttttttttttttttggtacactttcagatattgtaaacctatgaatgggtttacattagttgtttcatctggcccaatagtctgttattttaattaatttggaataaaggataaaattctgacttttcaggtgttgtctctagaatgtctctcttgatggtactacatgtgtgaaggaggaagataatacttggctgtcatctcctccctcctgcagagtacctttctgtcacagggtaactcctctgctattgttgtcctatcttctcttctcgagggttgctgctctcttccctcctctccaggtcaggggcatcgggttggcggcgtcatcggggcatggagtcacctgggtctgctcctcagcttgtccgacaggttcgggagcatctgtcctggcttctgattcttttcagaacttttaccacgctgagcacttgtctctggagcttgagatgtttggctgtgggttagacagagattgacatctttaatgcaaggaaactgaactgggtagacgagctctcaagtatggaaaagtgtggctgtctccctgatatatattccattcctctttcttaactaataagttaaagttgtatttcttccaatcatgctcccggggacaggcacaggtagtttgtttaagcatttctttttctttacatgcatattcttattctttaatggcatttcttaacattattaactctttactctcatcacatctacttccatccaaagaaagtcctcttctggggactttcatacctcaaaatcggcttgaaatatcctgattaatagataaaggttattctttactctctaatggaactggtagtagattgctaccagttttgttgacaagaagtccattggatataaggatatatatccttattaaaaactttattccaagaagtttttaagataattgggtttgcagaaacttgagagtttccattttgcatgatatttctttgaaactggtaaaatttacatgaatacagcaaattacaagatactaaaaggtaaactctaaatcatttatcatgatgcctttaacaacagcattgtttgctgaagaactaagagcttcctctagaaaccgtgactcaatttaagaaaatgaaatatttgtaatagagcttgggagatacaattctttaaaaaaaatttttttaagtataattctagtttctcctaagcaggaaggcaagaactggcttctaccagtgagaaactgaataataataatatgacaacaccaacataacaataataaaaataataactattattatttttaacttctgcgttctctgaaccttatttggggaaatcctttgttacctgtatggccacatttggcagctagagctttttttgtttgttttgttttgtttttgcatgtgactttatggtttattgaaaggggccgagggagaaagctacaaaatttaagtacaaaagcacttagtagaagatagaaatatactctttttttttttttttttccattatctcgtattcctaagatggctccaataaggatccctgcttaactgagaaatgattttctctgagggagtggagcactcagtgttctttgctgactttgtcaccctgaatagcaacattaatgtctgtttgtttttcttctcattttgtaggatgaaaaggagcaacttatacagtccaagagttccgttgccagccttgttgggagatcaaaaaccattgttcagctaaagcctcgcagtccagaccatgtgctaaagagcaccatttctgttaaggccatctgtgactatcggcaaattgaggtgaggaggtggaaagggtacctctgggcaccagagagaacgaagggagaaggaatacgttcagttagggttatgataataaggaaagatcacgcgatagtttttcctatcagaatttaaacatgatcaaatctctcccatcatttttattttaaaaagcctcaactctgtaatcttgacctgctccctgcctcagtgattggcatcatcactcacccagttgcctaagtgttgaaataaatggttctttgtagcacctgggagatgtctttggctctcccttttcttattctcttcccaccctccctagctagaagggctaccaagtcaatactatcttgtggttctcacttgaacgtacttttttccatccctgctgctactaccctggtttagaccattggtttctctcactcagatcatcagcgtccccatccagtgcattcttttatcctgccaccagcaggatctttttttaaaaaaaaagagaagttattcctgtacttaaatcctacaataccccattgttcttggagagagagcctgaactccttaatggggcttgcaaagtcctgaataatctctctttacctctgctgccaaaactggatcgtgccttccatcgttccctggtaaattgctgtattatagcatttgtgacgtagtattatcgctatgagtcggaatcgacttgatggcactgggtttggtttttggtttttactataactacgcaaggagccctagtcgcgcagtggttaagcattcagctggtacctgaaaagttggtggttcaaacccaccagctgctctgcaggagaaaagatctgatgatctgcttccgtaaagattgcagcctaggaaacgctatggggcagttctactctgtcatatagagttgctatgagtcagaatctactcgactggacacaataataacattgtaactatataccccattagaatatgtggactataaactatatttgtgtgcttaccatttgtaccatttttatgcgtaaaaaaaaaaaaatttttttttttttagcctagatacttccgggcatataataaatatttgttacataaaagaaagaatgagactgcacttttctgtgtctcagtatttctttctataaaagagggataataatgttggttacttctctcccaagagaaagaattggtgattccaaaatgctgaaactttttcagggatttgggtgagacgataggaggaagaaagaagtatcgtaagagaaaagttgtggttattcatgtctcatttgtttttactctaatggttgtaggtgcagagagattggtcttaagggtcttaaaacctccttataattctcatatactaagttacctgacatgtaaaggtattttataaacacttacttccttgatttatttgatgtcacaatgtttcctgtattgcatgtttatacacattatctttttgtcaaaagcaggaacccttgctaagtgatagtagatctccaaaataattttttccttaatatcatagccttgggattaggcactggctaataatgggttgttgcattatccactagtaataatttgtgaatttgtctcttcagatcactatttgcaagaatgatgagtgtgtactggaagataattcacagaggaccaaatggaaagtgatcagccccacagggaatgaggcaatggtgccatcggtctgcttcctcatccctccgcccaataaggatgccgttgagatggccagcaggtaactttgctcaactgctaattactgccgtctgctctttgccctgaataaactggtggagaatcacatttgcgtttgtgatctccttgagcaaaggaagcttttcttttggaaaagacctcaagacctcctattaaggctaccaagtcaagcactgccagccacataatagatcttcaataaatatttatgttgcattgtgacatagttagtggtatttcctttttaaagacttcttggttataaacagtttattctgagaagattgattttgtagtgatagccaattttcttttttaattttattttattacagtaatacatatgcacataaaaagttagattataccacaaaactcataacaaaaactaaaatcacctcccccatcccagagttctacttctcagggtcaactattttccattgttttagcagatttttctagtttttgactccaaatttctaaataatgtgatttttctatttcctgagtttttttttcaactttggacatttatctgctgacttcctaccctaggaaattagaatttaaatgtctacacagacccttccttctccctatatttccaatgtagttaatcacaattcttgttaaaattgatattttttgtttttacatgaaattgttttagtgctgaaccacttagtctgtaggcaattgttgtgagaatttcattccatcatgtcttacctctctgaacttatcctctgccactgtccttgcttactcagcttcagtcactctggtctttctcctgtttctcaaacacaacaagcatattcttgccttaggatctttgcactttctctgcttgcttcagatatttacacgtttgctccctcacttatttgtttcatcttatcgtcctcactgtccgtcactctctgtcttctttacttatctttaattttctttggtacacttaatactgccaaatggattacgtattcgtttattgcctctctcctcctattaggagttccaaaagcatagagatttttgtctgttttgttcatctccgtatcctcagcacctagaaccattcctggtacatagtagttactcagtaaatggttgttgaatgaaagaaagaatgaatgaattggtatctaaatatatgtatgaatacatttttaaatttcttgtataactttttgtttccctggagttgataatcacttttttagcttgcttaattgacacgagagttaggtcaatgacagtttgagggagcacagtctacgtaagatcacccacacttctgacaccaattgcaagcttgaggggatccccaaaaccacccttggatttggtcattcactaggatgcacagaactcactgaaagcagttttactcacggttacagtttattatagaaaaggatacagattaaaatcagccaaggcaagaagtgcatagggcagaatcctggaaagataccaaatgtggaacttccctcgtcttctcccatggcatcatggacacattactttcccgtaccgatgtctgacaaatatgcacagagtaaaaaaaaaaaaaatttttttttcagtcccaaccagggaagttcacctgagccttggttccagagtttttactggggcttgatcaaatacttctcatgtggctaacctcaatctctagccccctggaggtcgagtggtagagtgttatgagttgataccaggtgacccaaaacgcctaccacaaatcaaagacactcctatcaatcatgacattccaggggttttgagattacctcccagaggccgaggccaaagtccagaactctttttgttgttgttgttaggtgccccccagttggttccaactcatagtgacagtatgtacaacagaacgaaacattgcctggtcctgcaccattctcacaatcgttgttatgcttgagccaattgttgcagccactttgtctattcatcttgttgagcatcttccactttttcgccaaccccctattttaccaagcataatgtacttctccaggcactgatactcctgataacatgtcaaaagtatgtgagatgtagtctccccatccttgcttctaaggtgcattctggcctcttttcaggccaggttaaatgctttactacacagttgtctgtttgtatgttatgaatttattcccaaactcttctactttactcaaaaatgcctgtcagtataggcaaacagtgcaggcacttttcatttttattttctcttggaaacatccattctgagccattgtatcttcctgttccaatctggacccattctgtagacctgcttcagtactgccaccctgacatttctcttcatcttcactctgggaattcccttcacctctcttctgtgttggatcttctaatttcttgcttccaagttatttatttattccctggtccatggagaacactctccaatagctttctgaaaaaaggtgcatgggaggtaaattttttgagatctctcacatctgaaaatgtctttcctctcccttcctaattgattggccaactacagaattctagtttggaaatgatttccactctgaaccttgaagacattgctttattgttttctagcttctgggatttgtttttgaaacatccagtgccattttctttcttaagtttacataacaataaagttcactctttgtagtgagcaatactgttgattttgataaatgcgcagaatcacgtatctaccaccaccgtcacgacacagagcagttgacactaccttttgaatgaaatctttatttccctctctagaagattttagactctcctttttctctaacctttgaaagggatgctgtgccttcatgtaagtctttttgcagtcattgtactcaaactcaaaactcctgtctttcagatcggggaaagttgttcttggattatttctttaataatttttattctttgttttttcctgttctgcctttcaagaagtcccgtttgtcaaattttggacctcctgaaccaattctctagttttctttcaattttctagttcttcgtattttaatttttttttaatgtttctttaacttacttaaatttttaatttgaaattatttttctaacaaaattttttatcttatagagtccttttctgtttcttttttaatgatttgaagttttcttcagttctttgtaaagtctgtacttccactacatttattttttctctctttgtccattttggattcattgttttacgttacaggcttccctctaatgttgatccttgactgtctgcccacatttattaaaagtgaggcactgaaagcaggttggaagctgtgtctgtggcaggggcttgccaactgctggtcttcattgtggaccatcaaagatctggtcattttgctgggagacttccaaacatcagcatctgtaggtttttgattttgaacaccattttctccagagaaaaatctccagtcttcctattgccaactctgtcctccactgttgctttcagtggtatctggtgcttccaatttctaggcttttggagctttcttaatgaaaaatgacttgcttcttattggcttctacttacctctgcccttgcgcatacgtgcatatgtgctctaggcacctcaccgagtagtgaaaccaaagctatttagcattcagccattcacttcccatctcctaaaatttaattgacgttgcttctctgctgtggtcctttcccattctctccttgtctatgtaagcttagttttttttttttaaacactgaaaaaaaattgctgagattataatggtttttttggagatagggaagagaaactaatgagcctcttagttaaccagatggcttggcttctaggtttccatctctattttttttttgtttttaatttgatttttttattatggcagatttcaatcatgtatgaaaatcaagtaaaagtgaaataaacacctactgaccttatcactcagcttcaacaatggttgattcatggtcactaatctgtgtctgccccttccccccttacatttaagcaaatcctaatcatcatgtcatttcatctataaatatttcagtgtgtgtgtcaaaaataataacatcacattagtattatacctaacacagtgaaatataatgtcttaataccatatatcaggcaagtgttcaaattctcctgatttcaaaaaaaaaaaaaaaaaaaaaattttttttttttttagtttattccaatcagaatccagataccatccatacacagcaactagttgataaccctattcagtttattttaatctctatccaaaataggtttttaaaatcaattctttaaagatagaaagcacagatatcttgtgagtcattctccatctctattctttatatctcacaattttcctctcaactggaagaaattcaaggtagtttggtatgtgtgtgagtatgtttatgtatcagtgtgcttgtaaatcttctagacttctagcctgaattaggcatgggatgcttaagaaaaaacttctccaactcttcacactgcagtttcctctatatgcccagtgaacttcttaagttgctattaactcttttatcatttgctactttttcttttaaacaatttttattttggtaacatgtatataacaaaatatttgccattttagccatttttatggggacaattcagtgacattaattatgttcaccatgttgtataaccatcaccaccatccatttccaaatttttacatcacccttaacagaaactcagtgtccctttagcagtaactccccatttccctcctcccacctgcccctggtaatgaagttgctattaacttacagacgttttggcagttttttgttttttttttaaatattttattgtgttttaggtgaaagtttacacagcaaattagattcccattcaacaattcgtatacaaactgttccatgacattggttacagtccctgcaatgggtcagcactctcaccgttttcacccgcctgccccatttccacccatccagttttcctcccgctccttgcctcctcatctttgctttgggtaaatgttgaccatttggtcttgtatagttgatgatttaaaggagcatattcctcatggatattattattttgtaggcgaatctattatttggctgaaaggtaacctccaggggtggcttcagtgccaggctaaaagggtatcttatggctctagggggcttctcacgctctatcaatccagggtgtctgtttttttttatgaatttgagttttgttctacatttttctcccgttctaaccaagactttctattgtgtgcctggtcagaacagtcggtagtggtagccaggcaccatctagttcttctggtctcaggctagaagaggctgtggttcacgtggcccattagtcctatggactaatttcttccttgagtctttggttttgttcattctactttgctccagactggaagagatcaatagttgtatcttaggtggccactcgcatccatagtgtttttttttttttttttatgtatatatatttttattgtgttttaagtgaaagtttacagctcaaattggtatacaaaaatttatacacacattgttatgtgaccctaattgctattcctatgtcagcacactcctcctttccatcctggatttcccatgtccattcaaccagctcctgtccccttctgccttctcatctcacccacagataggagctgcccattcagtctcatgtatctacttgaactaagaagcacattcttcacgagtatcattttatgtcttatagtccagtctaaacttggtctgaagagttgactttgagaatgtccatagggttgttttttttttttattaacttttattgagcttcaagtgaacgtttacaaatcaagtcagactgtcacatataagtttatatacatcttactccatactcccacttgctctccccctaatgagtcagcccttccagtctctcctttcgtgacaattttgccagcttccaactctctctatcctcccatcccccctccagacaggagatgccaacacagtctcaagtgtccacctgatataattagctcactcttcatcagcatctctttcctacccactgtccagtccctttcatgtctgatgagttgtcttcggggatggttcctgtcctgtgccaacagaaggtttggggaccgtgaccaccgggattcctctagtctcagtcagaccattaagtatggtctttttataagaatttggggtctgcatcccgctgatctcctgctccctcaggggttctctgttgcgctccctgtcagggcagtcatcgattgtggccgggcaccaactagttcttctggtgtcaggatgatgtaggtctctggttcatgtggccctttctgtctcttgggctcttagttgtcgtgtgaccttggtgttcttcattctcctttgctccaggtgggttgagaccagttgatgcatcttagatggccgcttgttagcctttaagaccccagacgccacatttcaaagtgggatgcagaatgatttcataatagaattattttgccagttgacttagaagtccccttaaaccatggtccccaaacccccgcccttgctccgctgacctttgaagcattcattttatcccggaagcttctttgcttttggtccagtccaattgagctgaccttccatgtattgagtgttgtccttcccttcacctaaagcagttcttatctactaattaatccgtaaaaaaccctctccctccctccctcccccccctccagtaaccacaaaagtatgtgttcttctcagtttatactatttctcaagatcttataatagtggtcttatacaatatttgtccttttgcctctgactaatttcgctcagcataatgccttccaggttcctccatgttatgaaatgtttcacagatttgtcactgttctttatcgatgcgtagtattccattgtgtgaatataccacaatttatttacccattcatccgttgatggacaccttggttgcttccagctttgtgctattgtaaacagagctgcaataaacatgggtgtgcatatatctgtttgtgtgaaggctcttgtttctctagggtatattccgagtagtagtagtgggatttctgggttgtatggtagttctatttctaactgtttaagataatgccagatagatttccaaagtggttgtaccattttacattcccaccagcagtgtataagagttccaatctctccgcagcctctccaacatttattattttgtgttttttggattaatgccagccttgttggagtgagatggaatctcatcgtggttttaatttgcatttctctaatggctaatgatcgagagtattttctcatgtatctgttagctgcctgaatatcttctttagttggcagttttgtaaatatatagaacgctttttaggcagggatatcatcattttccaacagtttcaaacaggtatagcctatctgttcttttgtctattcttgttcttcctgggtatttccccctctctaccttctcgtaatcatgtcacattcagataacgtttataagattgctatatacgtgctagtacatataatactctagcaaatccaagtagtttgatgatctcagttaattgagccctaaagacttcttctgtgttggtagtatttgatttgctgtctttctctgctcagcctataagttcatttcttctacaacatttgcatttgtccttaaaaaaaaaaaaaaaccaaacccattgccatcaagttgattctgactatagtgaccctacaggacagagtagaactgccccacagggtttccatggctgtaaatctttcctgaaacagattgccacatctttttcccctagagcaactggtaggtttgaactgccaacctttcagttagccaccaagcgcttaaccactgtaccaccaggactcctcacctgtctttagcaggtctttattgtagagctcaagtcttgcaaaagctgtagccaggttctgtgttgtttctagggtggagcagtcttatcagaaggtgatggccctgtggcaccagctacatgttaacaccaaaagccttatctcctggcactatctgaggaaggaccttgaccttgtacagagctggaacatagaaaaggtaattatgaagactgccacacaaattcacatcctgttggcaagctttttccagaaggagcttttttttttttttttttttattgctgtgggactcctacccatgcaaatggactcctaaagtggagtcaatgatattgttctagggctagaggcctgagaatctcaggaactagaaacagcatcctgaatggttagggaaattccttttgaaaatttaagtgatatcttttatcttcttggtgaagggagaaggttgcagccttctttttacattgcatgacaagtatcccctttgcataaacgtgtgtattaggggatgccagtgaaataaatattgttaagagttatgtcctgggggatacaaggagtgctcctggagttctggtaatgttgtttcttgaggtgaatactgattacaccccaaaccaaaaccaaacctgttgccatcaagtcgattccaacttatagcaaccctacaggacagagtagaactgccccatatggtttccaagaagtgcctggtggatttgaactgccgaccttttggttaatgggtgagttaaatttgtgaaaaatcaacaggtatttacagtgatgatttgtggttttttttttttttttttttttggatgtgtgttaaacttcattaaaatgttgagagagaggaagttatattctcattctgttgaaatttctcctgtttttttctctctagcttcgatctttagcacctggggagtaccaccagattatgaagaatctccaggcccactacgaagactttctgcaggatagccgtgactctctgctcttctcagtgactgagcgcttgcgcttagaagaggaggtggatgcttgtaaagcacacttccagcacttgatgaagtccatggagaatggtgtgtgcgttgggaagggggagagagggtggtggaatgagagccctgaagggtgctgctagactcttcatataaactagaaagtaacatcaccaccactttaccactggagttgttaaaaccttggaagtagggaaaaacttgtagagataaattctcaaaatcaaactgtggtagaagaggcctgctggtcattattactaatcagcctatcacatttcttttaaaaattatgtgttttgatcctcaaagatcaatatataatgtgtggaatttaggagcatgcagaaggttccccaaataagttctcgcttttattagtagagtatcagatctgctggagccagaggtgccctcagtctgctagtaaatcttttgtccacagatgtactaatccctggtatggggcctaatggtcttcttgcttgtccattcacagaggacaaagaggagacagtggccaggatgtacatttcagagctgaagaatatccggctgcgcctggaagagtgtgaacagaggctggtcaaacgaattcattccctgagcagctccagaaccgacgaagatgcccggcaggacaatgcattaaggattgcagagcaagaggtaagccccacgagcaagcatactcattgttatatagaaactcatcattagggtgtcattgtttctaggccctcttcagcagacagttagaaaatgcatgcatgcctacacacacacaaacacatctgtgtcattcatacatgtatatatatctttgtgtgtgttttatacgtgtgtatatatatgttaatgacattggtaaatcaatatgcctgtgcttacctattctatctgtgtcacactcttgtgtgcgtgcgcacacacacacacacacaaccatgtatctccagttccaaaccacagggcttattctgtcctccccctctccatatttataactcctttccccagtatcgaaaaatctgcttcacgttattcacagtattttacgtattgctcaatcctagcatacacagaaagtctcagaattgctaattaatacttcatcaaacataacaacaaaaacactactaactggagctgaacatatatatatatatagttctttttgtctttatactgaaagtatatctatcgtctagatactacattcagaaattatttatgtgtattcctatctcctcccctcacagtgtgattatggtatacatctgaaatacagttagactcattgctttctgtttgtgttccattttagggttttcttccttccttcctttctccttccctctccccctccttccctttttcttccttcctcccttcccttctttctaagaatgtaaagcattaacatggttccaaaagtccaaaactacgcaaaaagatttggtcagaaatgtactccctcacccagtctctttaccacattcccttttcaatttcattcttatatcttctttttgcataattaaacatcatgtgtatttttctcatttccccttttatgcataaaaggtaacatactatatacttctctggcatgctttttctatttggtataccctggaatctactctgtatcatttcttagagatcttcctcattctttttgtacagttgcatcctctgtgtggcaatttcagtttatacacccattctcctatgaatgggcatttaggttgtttccaatattttgttattataaacaaagacctttttttaaaatcttaatttctgccttcagttctatctccatctttgttctgtgtttggttcctgacagcacacccaggaagatttgcagcaactgaggtcagacttgaatgatgtttccataaaatgcaacagctttctccatcagtctccatctggttctagtgtcccaactctgcgctcagaactcaatctgctggtagagaagatggaccatgtatatggtctctctactgtctatctgaataagtgagtgaaataatgatttgggtctaatggacagtattttccattgggatcacaaggggaggggaatggagtgtttcatgaacaatccagagagactgcaggttttggagcgcacatagcacgatgataggtgttggttctagttccaagtactatggagtgcattcatttgcctgaagtgaacaaatgccagtgagacagaagggcagttaacttgccttgttaggactattttgtaccttatttctgtttgattagacacctctgaaaacaaaacttaaagcagtaaaagagagagagagaaactgaagaataaaaagaacatcttcaactgaactaaatactagtttttgaaggtcttcccttaacccgcctccccacccatgaccttgaggagtaatacatcttagacccttcctagtgtccagtgaatttctggcctcacatcttttctctcaggaatccatcacatgtgcgtgtgtcccagcgccacttagaactttattttgaattggtttaaattggcagcatatatactatgctttcttgtttttacaaaaccctgtcatcttttggtaatggtgaagttaattttgacggttatattttgtgagattctgtgtagcatttcaggtatttagcccaggtcttaagatgtgtgtattaatgaaggtgattttatccgtaggctaaagacaatggatattatcgtacgtagcatacaggatgctgaactcttagtcaaaggttatgaaatcaagttgagtcaagaagaaggagtaccagcagatctctcagctctggagtcccatcggtccacgttaagggttggttgctctgcattctaagagggttgacttaacatatccattgctttgggttagcagagaaatccaactttggatggcatggcactgattaattttgcatttgaactgggcagaatatcaaagaagagctaagaaataatgtctagctagaaagggaaaagaactctgcctttctaattctccccgtccccgataaaatcatgacttagatacaatcagtggttgtgctgtaagtttataaaacgcttagccattatctcatttgattctcacaagcaactctgtgtggtgaatggaaaaggaggttttatctccatacagagatgagaaaatcaagactcagactggctaaatgacttatcttggctacataacttataagtggtgggactaggttttgaacacagttctctgcatatttctctgtacggtactacctgcctttggcttctcagtgtccgtcgggaaagcaggggccgtgacctgtggaggcagttctgccacaaacatatttgggtctagcttcttaattatagacataatgtgaagtcagctgtagaccaccgtctacagtggaaaacgcttaacctgttgctatgcttatgtttctgtagcactggcttagtgatgtgaaggacaagaactcagtgtttacagtcctggatgaggaaatagccaaggccaaggtggtggcagagcagctgagtcgtctgacaccagagcgaaatctggatttggagcgctatcaggagaaaggttcccaactgcaggagcgttggcaccgggtcatcgcccaaatcgagacccggtgggtggtggcacctttttctccctttggagtcttaaactaaaatagttatacctgcggattcttgtatgaaggcaagaattggtggggaggagtagaaattaaataacagtgtgaattctggacaggattggtgacggaatgttgagaccaccagctctgaagcagacctgagggttgcttttggatcagcagttgctcagtatggccctattaacaatgtacccccccaccccaacctcccaccccagggcttatctaattaacccattgatgaccacgacttcttagaatacagaccagaaaggtgactttggtggtcttttctcaaggacagaacctggatcctattctttttcactagctttgaatccagatgtgagccatttttcatagtggagctttgcatccattctcatttgctaactcagtggtttttatctctgttacttgagagcctgcttcgaataacagattgaatgagaaaacagaaaactatacctttcttagaccagcctgggtagggaaatatgcagggggagggggttatagcaacttacataaatttaaattgaatctgtctaattgtattactatcccaaggctgattaggccaatggaagtggtatgagtggctggatgggctgacacagtaaaaacgtactattttgcgacacgctcccccccgcccccatttcaccctgagaaattatagcgtattcataaatcatagctgtggtactctgtcatcagagtccagaagtgtatagccagtactaccttatcggcaatgctggtggtcctaggtaaaaaaattaacagggataatcatggaatgccaggccacaaggcagtttctagggctagcagagcacaactatgttctattccctttttatcccatagggcgctgggtgcatgcacaggtctccctctgccttgtgttgctgttccccataaagaagatgtgtcctcaatgctcaagcccagctggaggcatggctaaggagggaattgcctcatttactttgttgtactccaaacaaagctatctgatagctgtttccctttgctcctccagccaatctgagctagaaagtatccaggaagtcctgggagaataccgagcctgccacggcagtctcatcaagtggattgaggaaacgactgcccagcaggaaatgatgaagccaggccaggcagaggacagccgagtgctgtcagagcagctcagccagcagacggtgagtgtggcaggagcccagaggaagttgcaaggtagctcatcataaaagatgatgataaaagatattctagcaattaaagctttcccaaaatggcaaaacattccaagtcccctcttctaggagaagttctaggaggggttcgagcaggagagtctgaagataatggttttgtgtttagaggatctgtagggtaccttctaatcctgactttctgtgactatatattgaattcgctagattgacagattaaaattatcttgcattattttgtttcttggtgttacattttattttgttttactaggattaggatatgtgggaacaaaaaccaagggaaagctgtgagtgaaagaaaattatcatttaaagcagtttttatttgttgctttttttaaaatagtaatttattgtgtttttggtgaaagtttacacagaatattaggttcccatttaacagtttctgtgcatattattcagtgacgttaattacatttttcacattctgtaaacattcttactattccagtctggttgccctgtttccattaatctagcttccctaccccactcttaccttcccatcttcgctttagggtaaatgttgactgtttgatcccctatagtaaaattttttttttttttagagcacagtactcacaggtgatgttgtttattttatgagctaatctgttatttaattgaagggtgatctccaggagtttcaggtttaaagtgtgtctcagggtagcagtctcagggattcctctggtctctaccaatccagtaagtctggccttttttaagaatttgagttttgttttacatttttctcccattctacccaggtccatctgttgttttccttggccgaatggttagtggtggtagccaggcatcatctagttctttgggtctcatgatagatgagcccatggttcacatgggctattagtcttgtagtttcctctttgagtctttttttccttctttctctttttctcccgtcgagtagacaccaatagctttatcttagatgatcacttgcaagcttttaagaatccagatgctactcaccagactagggtgtagaacacatactttatgaactatgtcatgctaattgactgggttgttctatgatactatggtcttaagccttcaaacccagtaaacctatcccatgaggtatttggttatatctaggaaatatccgtaactgtgacccctatgtgctttattatatatatgaatatatatgcagcacaaacatgtatataactatgtctacagatacacctatacttgcacacgtatgcacacacatataccttcctgtacacatatatgcatacttatctgcctgtgtaaccacacgaacattttttggctgatattgctattgttgcaaaactgtatatgttaacagcatttaccaaaacaccccttttccttgtgtacttccttatgccatcatgtaccttgttcacgttgtgcggacttcacctgcattcggtattgcctttctcatcaccaaaaataacaagtgtctactacctagaaagtgattccccgttcctccccctcccatccctggtaaccaccaaagtacattttctgtatgtatacttattcttttcttttgataaaagtgagttcatacaatatttgtccttttgtggttgactatttgatttgttttgttttattcagcattatgattaagagtatgagatctgaagttggattgcctgaatttctatcctggctcactcacttaactatgaaaccttgagcaaattacttaacctctcagcagtctacttcttcatcagtaaaatgaacttcttcatcagtaaaatgaacatagcctacttcataaggttattgttgttagaattaagttaactgatacatgtaaaatgcttagaattgtgcttcttaaagtgtggacccaagatcaacagcatcaacatcactgggaacttgttagaaatgcaggctcttggcccaacctcaaacctactgaatcagaactctggtggtgggcccagcaatctgtctttttaacaaacctttcaggtgattctgatacaactaaggtttaagaaccgctaccacagaaagtaataaatgctcacagtgttagctgttttcatgatgagagtgatgatattgttatgatattttgattcctaggatctgtttgcagaaattgagagaaatcagacaaaactggaccagtgtcaaaaattttcccagcagtactccaccattgtaaaggtaagtccaccatattccaaaagcaacagaaatgaactccagcttaggaaaatctgtttcagggcaaataagcagagctcttttgctggatactggccttgcccttcagttaatgcagatgtgtacttcctgcagcttgaagatgctaagtgaggtaccagacaacagctacacctatgatgtgaggtgtcaccatttgtatgacccataggccttttaaccataccatgtcaaaaacaagttttgggttttcctcttaaatctgctttatacccatcttgcctgtctcaggaataagtattatcattttcctaataaccaaaccaaacccagtgctgtcaagttgattccaactcatagcgaccctgtagagtttccaaggagcacttggtggattcaaactgccgaccctttggttagcatccgtagcacttaaccgctacgccaccagggtttccattttctgaggcaaaaaacccaagagtcatcctgagctcttctctttgcgttaaacttgatattcaatcagtgaacaagttctcttggctctgcgttcagatatgttctgaatctgacagcctctcatgatattccttctgtgtccttggttcacagctaagtgaggaatctcacttagaccactgttgttcctctgtgctgatctcctcctgcttcttttcctgcccatacagactgttctcccatatacagctagtccccaacttacgacagggctccattcccacaactctgttgtaagtcagtcctggcattaagtcaaatacctctttttttttttaattttcattattattgccttttattatcagtatctttataaatccgatctttgaacatctgtcagtgtgcatctgagaatgataacatcagcaaattacacactgcaacattgtatatagtacatatgactaatgataagatgtacaaaaaaaaagggccataagtgcagttcgtcataactcgagtgcgttgtaagtcagggactactgtagtagccttttgaaacatactgcatgtcactgaatctcaaacaccatcagttagaagctacaccgttattttatgaaccaccaaaaacgggggtgggggaggcggacacgctgccagttgtatgacgtgccattgcttataagacatgttctaattttagagatattaaagtggggaaaatgtgcatcttggaatagatggaatatagtaaatcagatcatgtcactctcctgttctaaaatctccagtggttttgtattatactcataaaaaattctaaatccttatatggtttttgaagcatgcatgacctgtccttttcctctttctctgacaatatctttaaataaaaatgacctgagattattatatatttaagggttttttgcgtgctttcccactagaatgtaagttccaagggagcaagattttgtctgacatgttctgtgtgtatagcacctagaacagtggcacaaaatagatgctcaccaaatatattttgaatgaacacatttctttagttaatagcaaaagacttggggggttagaagacctgagttcaaattctgtcttcatcatttttcaggcttgagacttcgaacaagttacctaacttctcttgagtttctgttgctgtatctataaaatgggaataatgactacctcaccaggtggttataaagattaaatgaaaaaatgtataaatagggcaacacttcaaacttaaaatatgttcagtaaatggtaacaattgcttttgtcgttaattaatattttattactacgacagtttttttgtggaatgcttaaggaactcattccatattttccttctgcctagagatttctaagtagatagcaggtgcaggacattccaggcaaggaacttcataatcaaaggcacagagaaatgaaaataaaatgactgtgttgaggaaatagcaagtattctggcatagctgggagagtacatgagaagtagtgactgaggaagatgagagggcccttgtttagctgttttggctttgtcttctattcttgcttctcaaaatgtggtctttgagccatagtatcagcatcacctgggggcttgtcagaattgcagaacctcagacctgctgaatccggatgcattttcacaagatctccagatgattagtgtgtattttgaaatttgagaagctctgctctaggtaattgaaggcattaagcagaggaacaggtcatctttgagctttaggaaggtagcaggatagagaatgcactggaggtgagactagaagctatgagagtagggagggaagctacaggtgagggatgaagacggcctgaaccggggttggagaggaagcggcagaatagcatggtgaagtgagaagagcattgggttagggattagaaaactgaaattctaatcttgactctgctgctcacccactgagtgacataattagggtaattcacttcccttcccaatttccccatctataaaataagagggttggtcagcaaactgcaaattcagagattagcaaaccataacccacaggctaaatcaggaccctctcgcatttttgtgtgactgatgagaaatagtagaaaagaaatttgagaaacagtaatatttcatgacacatgaaaattatgcaaacttcacatttcagtgtcgataaataaagttttattgtaacacagctcattcatttacacatcgtccatggctgttttgcactataatggcagagttgagtaattgcgacagagaaagcacagcctgctattttccttcagaaccttctgttaacctctagtgtaaatgaccactaaaaccacttctagcagtatagtgctatgattctattaaatgacgtgtgtgagccataaagctctacgtgaatgtagtaaaaaaaatttttctccaccaggactatgaattgcaactgatgacatacaaggcctttgtggaatcccagcagaaatcccctggcaagcgccgtcgcgtgctttcctcttcagataccatcacacaagaggtaaaagggcagggaaaggaaatatgccactgtcaccccttaaagaaaggcttgcttgtccaggccttgcggtttgatttagggctcacctttctgttgagcatgtgactccatgaaaacttccccttattttcaactgtttacttttccagcagataatttatctaagttaattttttgaaccacagttcatggacttaaggactcgctacacagcattggtgaccttaacaacgcagcacgtgaaatacatcagtgatgcactccggcggctggaggaggaggaggtgaggacatttggcccctaaatcaccttgaaagtacaattaaaaaccctgtggctcatctgttgaaatttaaaatgtacatattagcatccccacctccaaatatctttatcgtagaaatatacgtgcacaaagaaagaggtgtgaacaaagatcttcaataaagtacaccataattttggaaaaatcggaattccacacaatggaatgttatgaagctgttaaaaagaatgaaataggtttaagtcaaatgacacgaaaagatgtcatagtatactaatttgggaaaaaaggcaagttagagtgctgtgtatacttacgagttcggtaaaaaaaaaaaaaaaaacaaaaaactgtgtagtcaccacacaaagacacaatatgagcgtagaaacaagtttagaagtctatacaccaaatttggggggaaatgagattaaggggacgtatattatgcatggaaaccctggtggcatagtggtttaggtgctatagctgctaatcaagaggttggcagttcgaatccaccaggcgctccttggaaactatggggcagttcttctctgtcctatagggtcgctatgagttggaactgactcggcggctgtgggtttggtgatgttatacatctcagatttgtttgaatttgtcataaggggcatgtaatcttttcgcaattaaaaaaaaaaaactatgtttttgcaaaacaataaatgtaactggtaaataaatatgtggaaagttattcaagcactcttacagaagaaatgctgttgaaaacattagccgtaccatcttttgcctatgtaaattagctaaaaacttgattcacatcgatacttacctcgcttcacctctgttggctttagtctcttcacctgaaaatctaagaattatgaaaacaaataagatgctatatgtgaagagctttttttttaaatcaataagtaattatggagcacctatcatatgtaaggaggagccctagtggtgcagtggttaagcactcagctgctaactgaaaggtgggtagttcgaacccactagccgctccatgacagaaagatgtggcagtctgattttctgaagattacagccttggaaaccctatggggcagttttactgtattctacagggttgctatgagttgaacaacttgacaaaacaaaattttttttgtcagtgtaaaacactgatttttttaggaaggtgctaacctagatataatgaatgtagctgttagtgtcatatacttaggcacctgtgagcagtgctataggccagctcatttaggtaactttggtgtctctgctttaggaaatctgaagtcattccagtctaataaggcattgaccaggatattgattttctatttcttattctagaaagtggtagaagaggaaaaacaagaacatgtagagaaggttaaagaacttttgggctgggtgtctaccctggcaaggaatacacaaggaaagactacctcatcccagaccaaagaattaacagacattgaaaaggctattttggaacagcaggtgagtagacagtccatctctctttatctgaatagaataatatatggtgatacattaggcggaataatacgagtaacatatgggccattgtaagtgattgttacctcagtaaatattgacttccaggacttaaagaaacttgtgaagtcatcttgtttttacttctactttaattggctatagttcattggtaataataactgacctaaactgaattttttcctagaagttttaaaagttatttctaatgatttttgattcttcaattttttggatactgaagcttttctctttatttctactatatagattctaacagaggagctgacaaacaagaaggaacaagtctctgaggccatcaaaacttcacagatcttcttggccaagcatggtcataagttagtatcaaatgagagattatggcacatctgggagacctactctgcctggctaaaacttagggtcataatgagaattcagcgtggcaagagtcagatcatgaagagccttgcacttcatgctgagttttcattttactttgttggctctggggagggattttgaacatgattggattttgtttataaagattgctacaacagttttatagagtatggattgaaatgagacaagactagaggctgagagatcagttaagaggctgtccaataatgtaggcaagaaatgacaaggagtgcaaaggagggggcaaagatttaagaactattaagtatgaagaattgatagagctcagtaatacaagaaaatcattggatataactcccaggtttctggattagaccactgggtgtatggtgatactactaaccaagacggaaggggtggatggagggagaagagggtagctttagttttagacattgtgagtttgaagaatctgtaggacatcagagtagaaatacctagtatgtattaggaagtacttaatacgttaatttatgccgtacatgtgtcactaatggtggaacaatgggcagctctatatgtgagttttagagttaatgagagaagcctaaactgatagagatttgagtcatcagcaaaatagaggacataagagtgacttagcttaaaggggctttttagggacttcttgaattataaaggaaaccttagaggagtgagtgtcttagttatctagtaccgtcgtaacagaaatagcacaagcggatggctttaacaaagagaaatttattttttcatggcaaagtaggctaaaagtccaaattcaaggcatcagctccaggggaaggctttttatctctctcggctctagaagaaggtccttgtcttcaatctttctgtggtcagggagcttctcaggctcagggaccttgggtccaaaggacacgctctgctcctggtgcagctttcttggtggtgtaagatccccaactctctgcttgcccctctttcctttttatctcttgagagataaaaggtggtgcaggtcacaccccagggaaacaccctttacattggatcagggaggtgacctgggtaagggtggtgttacaatcctaccctaatcttttaacataaaattataatcacaaaatggaggacacccacagaatactgggaatcatggcctaaccaagttgttacacacattttgggggggacataattcaatccatgacaaggagtaaaagcaaaactatgagtgatacctcagaaccccagaaagaacagagtccaaaaaggagggagtggtcagaagtcaagaaatgataggactgagaagtatctattgctactgggatgtttttggtgacttttgtgaaaagttgaggaatgatgccagatttagtatgagggaggagcacgtgagaggtgaggaacacagtgatagtaaaattagactactctttcaagaaacttggccatgaggaaaggaaagagataatatagcaaataattggagtggagtatatgatcaagagagagttttgttttcttaaaaggtaggaggaatttagctgagtataaaggaccacaagggagaaagtgatcacagataggagggagttcctagagaacatgggagaggatgaaattcatcaataagtagaaaatgcaaccttaaacaggaggtgagacagcttttgctctgaggttatgagggaagggagattaggaaaggtgtggatagaggtaagtttgctaggtataaagtcagaaggtcagagaattagtgccaaatgacctatattttctttctgaaatagagaggtagtttgctgcaagttagagtggtgctggggagaagaggggagagcttagctggaacctccaagaggattgtcagggaacactgaggttggaaaccagtaagttctctctatatgattgtgggatcctttccaccctcccccactggaattacttagcagcctgggtgggggaagcagagaagtccagcgtttgattgattggacttgggttttatcagatgagtgaggggagtatagaaggataatagtaagggactgattgagaagatggcctgtgaggtctgggcgctaaagagacaaaactaaagataatagagaagactgatagataacgagaaaatgggggattcaagaagatttgggaaatgtcaatgaggttgatggatacttgtaagatgaatcaacatagttaattctcagaagcatagagggaaaaaagcaagttgcagaattcaccaaatttgtgatgttgattacttctggacagaaaggaacaggaatggggttggtgacatagtgggctttaattatatctgtaatgttttatttcttagaaaaaagatctgaagcaaatatgacaatttttaagtttggttaagctggataggtggctaatggatgaatgagaatttgttatattcttctcttttgcatgtttaaattactttattttaaaaagagaatagatgtagaaggagtgaagaaagataaaagtgaaagagagggttataatctgagttacaatcatacaatggattctagaaatttagatttcagaagtagaataatttcagatgatgacaaagtctaagtgagccatgtatgggtgggaataaaatggagtagagtgaggtcatttggattgaaaagattgcagaaatacaagcataggtattagactggggacataagcattgaaatcaccaaggatcatgacttaatttgagatagagaggaaaactataagctaaatcccaaagtcttcacagaggatggaagactgaccaaatgatccataggtaacaatgacaaagaagcacataccatcgaaggtagagaagtaaagcttttgaagcaataatagagagtttggagaatggtttttctttaaaagagtttcaatgcttcatcttccaggctctcagaaaaagagaaggcacagatatctgagcaattgaatgccctgaataaggcttatcatgacctttgtgatggttcttcaaaccagcttcagcagcttcagagccaattggcccagcagacagaacaaaaggtacttctcatttttctctccagatgttgggaggctacctttcgaatggtatgaaaacagctttgccgattgagagtcataatcactagctttccatgaccaatgtgacttaatttttaacctcacattagcagccatttgtcttgtgcttctttactggggttccatgatgtgttggtcagtcaaacactagaaggcaattactgctaaccctttagacctggttcaccctttttgttgtctgcgattttgtggctgattgtggtcacctgttgccattgagtcgattctgactcacagtggtcaagaataacattaattactaggtctgtattatgtctgatcacaggacagcaagattactcctttatggccttgtcactcaaaagttgatagccaagagttctgggtattgggatgaaaaagccatgaacctcctcccttcttatattattttcatatctgggtaaataaatgtgaaatattctgttctaaaacaaactggtaggttagcttcactgactgagacgctggttcctctcactcatagtcatcccatcgtgtggcatctttaccagtccattccatgttcatttcctggaccatacgaaagctgttgaagttcctgcttattgtccttagttcttcttggatactcgtgtgtttatatgtagacttaccatattatatacatgtgtctctgggatatatatgtgtgtttgcctgcttatttcctatgttgtgaagcaatggccaacttatttgggacaggccaaaattaaactcatgtggtaatcagatttggtccagatgatactcaaaatgatattcggacaaaatatgccttgactctggtccttggatatgaaatttgtgcaggaggagctagagttgtaaagaccacaggacagaaccagctctgacttaatagtatattttcaaaaagaatgtgctggtttagaattctctgtgtaaggtagcccacttctggtggcttgttgcttcaccatataagggagtatgtgaaaagttttaacaattgcttgctgagaacatccagttctcattatgaaaggttaaaaaaagggagagaaaaaaaaaaagaaagacagacaagctgctgagcaccactacattgagcatgatgtgtccctgtaccgtttgtgtgtttcatgtgaagtattgttctgattaactgacatccttgcttacaagtttcactaaccctttggagtttaagcacaaatgcacaaagggaaaagaggacgacctatctggggttcttttttgcaaaaacaaacagtcgcatgctggacgctaacaccaagcttacactgtgtgtgtgatacggctgaactgctccataaggctctatctcttatctgcccaaggcgcaccctgcaactctggtaagtagaagccttttatgttttgtttcctcctttccctctgtctttttgtgcttgtttaggtcaaaatgtccatgtttagtaggactgaaatggatttctctggatgacttcccagcttcctgcctattctccagttactagggtgttggaaggaacactgcagccttttctctttggctagattccaggcctttcctcaatgtcagcatttctgagactccatgaatctcactgaacaaattagaagtttttaaaggaatcttttcctttatcatagtgtctgcttctgaatagtctttacgtggattttataaaaggaatttttcatgtagctcaaaaagttgtatgccagggtacttttccctttaatctctataaaatagacacatagtggagttttataatttacaggtttaatgtatgcagattaaattctatattctggatcagaaaacaaagcaggggataacaaattacattttaaatggagaattctgccagttattctattagtagacttcatatggtgagatggagatgggaatcaaacctgccattccctcattgctgttcattctgcatctctcgtaatgtgcaactaaccaagcttgaaatcctcagtgcatgtttttaaaacctgggaaaaatgggtgaatgattttaaggatttacttagtatttatctatcaaatatttattgaatttcaggtactgttcctagacattgaatggcagactacctgctcttagggagcttacatcctcactgagctagaaatgaaatgccttatttaggaggcagggaaatgactggcagttgcttcagcaagatctttcaggagtaaattaaagagttaaataaggaccagagagtaacattgaccaaagagagggttggataaaatcatctatagaagatgaaggtaatgactgcgaagaggaagagctggaaattggagattaataaagctgataaagtgttctaagctgcgaaacacgtgaataatttaatttctgaatactatcactctgtggtaaaaagcttcaagatggaaattctttcagagctgtaaatagactttgcaagagttattttgacagtgcacaaagtttaccatgttcattgttcttaggacctaattcctgtgtacgatgcgaatctatcgtacttgtcctttatacacatctctttctgaatctgactggggaggcagtacaatagcataagatttagttttgtgaccttggtcaagttactcagcctctctgtactttatttcctcatctacaaactaaagattaaaataattactatcataagattgtaaggattaaatgtcagtgctcaataaatatattaagtgatcaataagtgttatcataattgtcgtactaacatcctagtctggaccaaaagaaaagtttctagtagttccagggtcaagggcccccagcgtgttctcatccttgacttgctacttccaattcctagagctaatttaactcagagcaattgctttaggagaagctagcattgaccaccaagagtatgattgcccctttgctaaatcactgcttgagtagtatgtataggtccgttttactgggatgcattagtgttctgtggctattgggctactttaaatctctcttctaatcctgtggacagtcctgatgcactcatcagcaggaaagtgctacttcaagagtcttctgcatgggttgcaacactgagaagttgttatatggggttgaattctcattttttgggaactggtatgtgtctgtaagaacctttgtggtgatttagtcttagaacttatttgccttcccctccttttcactgcttgccactttgtagaacttattattcagatatgcttaatgctaccatccctcaagtaatcaatgaaattccggtcctattaaacattctgcagtttagaaaaattcttttttagcattaatactctacacttgagaatgtttcctacaagttggggtgtattccaggctgggttttcctgatggtcagaatttaatacagttctttgaatgactcctttaaataattgtgtttctccattggctctgattccattttcttttttttttttcattttctttttagggttgcagagcagttgctggggtgattgacctaggcacggtggagatatttcccatcttcagagccatgcaaaagggcctcattgaccaagacacaggccttgtgctcctggaatcccaggttatcatgtctggcctcattgcccccgagaccagtgaaaagctctccttggaggagggtctagcccgaaacctcattaatccccagatgtaccagcagctccaggagctacaggatgctctgtccttaataagtgggctcactgagggcaaaggccctctttctgtggtagaagcaattgaaaacagaataatcagtgagagagttggactgaaaatcctagaaactcacctggcaactggaggtttcagtatctcccccagtgagaactgtattaacctagaggaggcttttcatcaaggccttatcactccacagcttcatacagttttggagtcttatttgaggtcatccaagaatttgatagaccccaacacagctgagaaaattggtttgctggacctgatgcagaggtgtattgtccaccaggaatcagggttgaaattgctacctgtcaagcaattggcaggggggatggtgagcttgaaatcgggcaggaaggttagcattttccgtgcagttcaggaagggctgatagataggcaggtcactgtccggctgctggaagctcagctttttgctggtggcatagtagatccaagaacaggacacagacttacagtagaagaggctgtaagacataatttgattgaccaagatatggcctgtgctattctcataagacagcttcaaacaggaggcatcatagacagtgccactgggcaaaggctgacagtaaatgaagcagtgagcaatgatctagtagctgcaaagattgccctcgtgattctggagtccctttggtcattcatggggtttctatggcctgaatctggagaaatcctcccgattacagatgccttggaacaaggccttgtgtctactgaactagctcataaaatcctcagtggccgacagcatattaaggctctgtttctaccagcaaccacagaggtttggtcctggaagaaagcaatagagaatgggatcttggacaaagatcttgccgataacttaaagtcagtttgcatacctgatgtgatgcctcacatgcaattagcagactcttcggaacaaagcaaattaggcattaatcctggagcagcagctctaccgtgcagcacgggccaaactgagggcatagcaagccacagggagaagctgttgtttcaactaatgactcacagctatattaatgtgagggatggacagaggttgctcctgttagacaaagagctgatagagacactaacaccaagagatggatctcaaacaagtcctccagaagtatttggaattgggcatcaaagactagaagctcctgaggaattacaaaaatcagctaatgtgaaaagtacagaagctttctatgatgggctgaccttgaggccacatgagttccaggttttttctcagaagaaagaatatcttgatcagaaaagttgcactgaagcaaaaggtacacagaccattgtagaaacagaagattcctttatcgagaaccctggaaaggacctgtttggaggggaacaaaaagtgagaaatccaaatgttaacactttaaaggtcataaataaagttaaatcagagttacaaagacagttgttaggtaccaaaaagggagaccgaacagaagtatccactagagaaaatgtcagcagtggtcaagaaacagagggtttgtgcttagcacttgacagagatccttttcctgttgaaacaccagcagaagaatggcaggctctcagaaagacatcttttacctgccagaaagaacaagcacacacacttcagactgaacatattccaggtgaaactggaagaactctcataaaatcccaagacaaaaagtcgcaatttcaggtagagaaaactctacatttagaatctgaattaaagtgtgaaaatgacatgaatatccagtctctggacaaaaagaaagttgtgaataaaatgcacttggatagggatgaccataaacaaagtcaagaaggagaaaacattgcaggcggcagttttagaatgacgttaggaaagagaggtgaggaagatgatggtagtgaaacctgcctctcatgcagtcgtccttcggaattgcttgaagaaactaccttaaatatattatctgcacagttactagatggtggcatctttcatgaacaaacgggtcagaagctcttagtaaatgaagcgatagcccaaggcatcgtgcccagtcatactgctgtgaaacttatgggaaagtttaaaatgtttcggggcttctttgactctcagacccatgagtctttcacaactgaagaaatcattgatgaaggtctgatggatgagaaactgttacataatgtcctcatgccagacaaagctataagtggtgtcttagatccccgtacccacacactctgctctgtgaaggatgcagttgcggttggactacttgacaagcaaacagccactagaattttagaggggcaggtggtgacaggtggaattgttgatgtgaaacgaggcaaaaaagtttcagtaactttggcctcaaatcttggcttggtggacagtgatgaccaggcagagcttataagtctagagaaagcttccaaaggcagagattctgaaaaaacaattagggagagattaatcaacttacaaatggaaacaactggcattatggaccctgataccaaagcccctttaacagttgtgcatgccattgacagaggtcttttggagagagatgaggccattcagttattgactaagcaagtagtagatggaggtatcattcaccatgtatctgggatgagactttctgttgataatgcccttaaacatggcttgattgatgaagatttatgcaggcaactcaaaaaagttgagaacttaaacctccgtcagtttttgcatcctggaacaaaggaaactatttccctccctgaagccataaagttagatcttattactccagacttgaaaagggaaatccaagaaattcagtccttgactggaaactttgtagatctcatttctggccagagattgaccttggcagaagccaaaaaagaagggctgttaactaatgaagcaatattgtcttcaggaatgatgcatgggattgtagatcctgagaattacagaattgttccctattcagaattagtaaagaaatgtaagattgatattgaatctgggcagagatatctagaagtaattcccttttccgacatcaaagatgggattagtggcaaggcacttacattgcctgaagcagctcagcttggaaaagtagactttgctcctacactgagggttctggaagcccaggcaaatactggtggaatcatagatactgctacaggaaaaagactgacactagcatcagctttggaacagaaattggtagatgaaaacatggtcagaattattgcatctcatcaagtgtcaaatggaggaattgttgacgtatttaatgatcagagggtgaatttaaaggaagctattgagaaaagattgatcagccctgaactggcaactatgatccaagtagatacttcagacccctatgatcatagggctcagattgaaaagcatgatggaactgaagtatgtgaattaaagagtgaatttctaagaaaggaaatgttaattgcttgtgatcaggctgctgaaatgagttgtgataaaggagaaactaagagaatatttcaaattcaaagtcgatctgtagaagaaacaactaaattgagacttcctattggggaacgggctaaaaaggccaggaaagttctgttaagagaatcacaatacaaagatcaaggtgagacgggagcttctccagatgctgaaggatctgccagcgtcgtgatttctggtaaccttaaaggtcaatccttggaccaagtttcagtagaacaccctcactcagaagtttgtaattttaaactcgaagagttcattcaggataacatgggaaacaatacaaataaagagcaggaaaaaatagtaacaaaagtagaaattatctctcatatgaagcagcctacttcaggtctggattctaaagaagtaagagaaaaccaaagggaaatgatttcaaaagtacaagaatcaaattgtgaaacttcaagcaaattgctaagtgaacaggcttctcaggagccagtgaatatccaagtgaaaaataaaagagagaagagggagatggttttagaggagagtgtcaaaacatgcacaccagcagttctttcagaagaagagttgaaccaggaaactggcattagagatgaacatgactttaatataaagagtcagcctatggaaataatcatacctgaaagaaggaaagaagctgatagagagctgggattttccattatttgtaaagctaaagactcattttcccaaatggtatccaaaggaattcctataagaaatcaagatgctttaacattcttcaatttgaaacaggccaacgaaggagaagtcaaaaatttaagcgtctgtttgacttcaaaaccagaagaaaatttatttcaggaaattaccgttgggacacagagtgagccatcctcttctatgaccctgagacctgaaggattgcgctaccaagaatcagttggagaagcccaagatgcagacagatcccaaatttccaaagcagacaagtcattccaaggaaccacgaggcaagagaccaactattatcaagattcctgtgttacttttaaatctaaggaaaccaaagatttgattttctcatctaatgaatgtaaagaaaagtcacaccaagaagtaatttttgactcagcaaaagctctgaagttggaagatactacagtttccagagtagacccaaaagaggtcagttatctggaattctcagacagaaaggaccttaatcatcaggacagaaaaagtgatcatgaactttgtggaatttcccaatgtaatgtagcaacaactcaggaaataactggagagaaatttctagaaattgcaaattctccaattacagactcagaagcagggtctcttgaaggcatagtgactcaggacggtcccagagttttggtgtcccttcttccagagaaactgttaaaaaatgtgtcacagaaagagattacagggcaacaggatgccattgctagccccactattccagagaccagtgcagaaaagacaatgcccctagcatcatgccctacaaagaagatggatgagaagacgctacacgaagagctcagagagagtcctggcagtgagcaaactccttttcatgaaggtgtaaacctggagcccttcaaagcaactaaggtaagtgttcaggggtgtatgtgcatattttttagatatacctagtttaatgctaaaattgttaactggatactgagtttacgtatgtatgatcatatgcatgcatacattttagggcagtagaagattttctaagatgtaactgagcttatagtctgcttatagcaccattgttggaaattagacaatggctccaaatgtcttcctgaaagttgcaagtttgaagttagtaaccaacatggggattaacttgaaatactgggtgatactacctgaagtcaaaatagcttttggaaatgtttgcaaaatgttgcttattggttgccaattaccagcttttggtccttgaggaagttagtataatcattttttgtctactgatttgagacaatttagacaaaataacatattttatttctccccactatatataatgctttttatttctgtctaacaagaaaactttgctttgaaaagcagattgaaaggagactgtcagagctgagtgagttttcttattggttccatagaatgtatataaccggcaactctgtctagaacatgatgagaagctagtatcctatctgtctctgttacgggacattgaaatgaggaccaaacagattcaatctctggagctaaacctgacagagctagaggatctgctatgtcaggccaaggtaggttctcagagacttctaccaggcccactggcttcgagatagctggttccatcttcctaggagattccaggacttaaaaggacctgattggtactctgttccagggtaaacaatctcaaacccttgtctgataattgtggaatgggctaggtttagatagactggacaagatttgtaatggacaggcttggatagactttggataaacttggctatgaatctaattgtgtaatcttggattaaatgaagtaatttgatggcacagtgattggttagggaactgttgtagtaattcaagcaaaaaatgttgagggcttgactttgggttaaaaatagtagattgaatgaatgtataaattaatctctgttacttccccaaactccactgaatgtatttgctaaataaaacacataaactcacaaggagaaagagagcaagagtggagaaaacagcagtaaagttttagaagttagaaagcagatagatggtaggatggtaagtgacttaacagaacagtcaaaactgaatcttaatcttacagcggaggaagctaagaaataatcagatttacactgcagaatcccccaaaggctcagaaattggtagtaccagaaagcagaggtgaaaatgagtctgaaaacaaggggtaattggttgaaagtctgtttaagaagcaatttgacttttcatctccagcttgcttcacatagcctggcagctgctcctaccccactgcagcagaaaactggaggtttatcctctgaggaaaagtaatacagggtagctctagatgtagggagatcagccacagttgaaggcaaggattccatactgatacggtaggattaactgaaagttcacatactgaatcttgagctccagccttctttcccccatggtagtcaaaccatgggtacccaagcgaaaagacctaacagtactgacaagagtggtttcccaacttaatagcccaacttcatcatccttaatgaaaactatagtcaacaaattcccacctctgaatgtagagtttctggtctgctttttggggcattactctcagacatgagcatccagaaagcttctaatacaaaagataggccaaaacaaaaaaataaataagaaaaagaaatttggaggaaatagagactactctcgaagaaaaatgtgttaaaaaatatcaccatttaaaggacaaaaagtagattgaaaaggtgtaaccgtagatcttagaagaaaaccaggtaagagtggtctcatggaaaccaaaggaggagagactcaagggtggaatagtcaacagttttaaatcctgcagggagactgaacacaatgaagactaaaatgggaatttaacacgtggaaagtcattggtgaacttgataagaatgggttcaatggagtgatgagggtataaaccagcttgccgtgggttgagagtaaatgggaggttagaaggtagaggcaattaatgtagaccattctttctagaagcttgattgtgcaggcaaggaaagagataaaacagcaggtaggggagatggactgagagagaaatgaaattttattcagatgaaatagttctcgaatggattttggggctgaggagaaagaatcaataaggagaattgaagttataagggaaagggagtgataatggatgggaggagaactgaagttataagggaaaaggagtgataacggatgggatgggatccctgaaggcatagaaaggtatggaattaaatagccaatgagagagaaggaaaatagttctttgactgaaactggattggagtcacaatgagcacagagattttagaggtttagagttctgggtgctgtcagtacccagagtatggctttgggtagggtggctgaaggggaattaaggatggtgcccagaagaaccatgacacatttctacagctttttttttttttggcttctctatttaggaccggaatattatagactatataagctcaaagcgtggtttgtggggatatttttatgttcttttttttttgttgttgttctgtccccttggagtttgaagtggaagagacatccttttgatggacttattttacagcttacgaagcaggtcaagtctgcataacagctccttggaaaaaggcataatgacacttggggaggcagcaagtggtattggagggagcagtgagctgagtcagaaaacctgaattcaagtcctggctctactgcctagagctgattctcagctgattctctagccttgattttggaggtaactccaccctctcccctcaggtattagacagggagctaaaggatttgtccactctggtgagtcaggaattggagtgtgtggatcagattatcgtcagccagcctcaagaagtacctgctcaattgttgaaggctctagagaaagatgctaagaatcttcaaaagtctctcagctctgtgactgacatttggagttccaggctactcaacctccagaatgttgtggacgtgaaaaaggtagtttcttgtttttatttataaacattcacaaggtctgggcaggcttggagatttttgtaatccaatttgccattatttcttagactaaaatgttaaatcagcaagtacagctggaagacaaactgcaagagcttaaggcctgggttggcaataccaatcttactttgaacagcaaggaatataacaatgccacagatgctgacagcctgaatcactgtctccagcagtatgaggtaaacttgtcacctgtcctgaagcatgtttatttatccttgtagttttatcaattttattttcctactaggtaaagcagtatctatacttattcttcttagaaagtatgattttccatttcagaaataaagcccagtattcagttttttaagttatcatacccctagagcttttgtgatgactatttctcttttcagttattctctgagagtctgtacaaaaaaccaaaccaaacccattgtcatcaagtcaattctgactcatagtgaccctgtaggacagagtacaactgccccatagggtttcccaggagcagctggtagattcaaactgctgaccttttggttagcagccagacagttaacctctgtgccaccaggtttcctagagtctacataatggcctagtattataaacttcagctcctctttataattgagcttctgtgatctgttgctagtttccattttgtcaaagaactaattcattctgtccctcccccacttcagaagaatttttaatctatgatctaaagcatgggttgacaaaccttctatcaaggaccaattagtaaatatcttaggctttgtgagccgtatggtttctgttaaaaccacacaactctgccaatgtaggtgaaagcagccttagactctgcgtaagcaaatgggtccttttcttcttgctagactccaaattaatagatgctttttataagtcagtgagaggaaaaaactctaaagtacatatgagcgagaaggattttttttccccaacattgttcttactttttattctactcgatataatatcacatatttttattacttacaccagtttacgtgccctctgctatagaagtccttcaccttcaagtgtttttaaagtcagagcagaactggagatgccccctccttctgtcccgtcctctcccttctccccaaacttaagagaagcagacataagtgtctgtggtcagagtccttgaataaaagcttatcctcttgcaagagtttcctccatctttcatacctgtttacagcatagtaatgataaccaaatataacatttcctttctcatttgggggagaaagtaacagactttccctgttctcttacaagatattacaagaagccagcgtgaagaaattcctatgatgtagtatgagatataaagacacaaagtcttatgtattggttccttctcctagttacaacttaaaagaactctcttttggaaagagaattaacattctaagcctcttttcctagagagcttcccagacccgtgtgttcacaaatgaaggaagcattctcttatgataaataccaaggaagttccccttgcctgctttgcaggactatccacaggtcccctgactactcccagtttcagagtgatagagctgtagatatcttgcttgtttttactgcatccaatgtaacacggctgatgaaaaggaaatgtttgcagaaaaattgcatacttctgatcgattttctgaaaattattctagcgttttagcagtttttactgctttaaaggagcaatataataagcaagtctgactgtaatctttcacagttttaacgtgtgtaagcaatgttatttactctaaaaatcaattcttagtgaaccacacaaaaattgcctatttctctgtactggcctaccagttcttctggacaaatacaaatagatatttgaacctaagaaaatacaatgagaaaggcgaatctcataccagaaattcatgttggactttccaaaatgttcttgtttttaatttgcacatattttggactagcaatagtatagttctgttagcataaataattgaaattcttctgcatttagaagtcaaaacccagtaaaggaaacttaattgttatttatgaggagtttggagagaccagaagtagagatttccaacattaggttggccctaaaaaccgtcagtgtggattatgaaaatacaagaaattaacctttctcattcattctttgattagagcaagtaggtattatgtgggtagagaaatacaaattttatttttctcttttgttccctttttctgcttgccttaggatttgaaacagcccatggctgaaaggaaatctcagctggatgctcttgcttttgatattcaattttttatctctgagcacgcccaggacttgtcccctcagcagaaccgacagatgctgaggcttctgaatgagctgcagaggtccttccaggaccttgccgagcagactgcaacccagatggatgtcttgcagggccatcttcgacaattgaagcaggcagcccaggttaaggtcagacagaaccagcagctggactctatttgtcttttgggatgtcctgtgtctttgggttttctggccagactccatccatcatgattccaggaacctgggtttaccaattttgatattttatgtctttcaggccagtatagttctggtcccagaggcagctgttctggctgtttttcttgccgtgtttttggttttgtgtgtgagagtactgtgtgtttacatgtgaatgcatgtgcaaatgtttactttttagtgagactaccctcactgtgtctcattgtctctgactttcaaatgaaaatcgtacagctagccctttctttcctgactttctcccttagcctccttctgagagttgttaggaacatttagatactctgaaatcttgagaaaaatgattctaaaatcagttttatcctggggcttatcaaatgatttacaataagatttcttgtcagctttaaacagctgacacatttttatcagaattatattaatttttagcacctcttttattattattattttctagcacctttcttcacactgtagtgtccagtgcctgttcaaccatggaaaataatgtgcagtatgtggaagcaggggtgattaaattttgaaaaaacgctgtaaccagcctatcatcttccattacaactctctcctggcaaaactcaacacagttacattaatagtaacatcatttctgctatttgaaaaagctggcatacagcaaaatattataattgtcattgttaacaacaaatatgtcctaaccaaaacccactgctgttgtgtccattctgactcatagcaaccctgtaagacagagtggaactgtcccataaggtttccaaggagtggctggtggattcaaactgccagccttttggttagcagccacactcttaaccactgcactaccagggctccaaatacacactaggggctcctttattaaatattgtgtaaaatagaattgaggatggatacatagatagacagacagacagacagatgtggagggagagaaggagaagggggaagagaaggagggaggaaggaaaaaaggaaggatgaattgagctttggagccaggcttaaaggaaattagtcaataccatacatccaccatcactgcttagttatttcaactacaggcagtccttgggttaccaacgtccaacttatgtacaacctgtggttacaaaccagcccctgtaaagcctattgtattaaaaatttgaggcacatacaacggttcataataacaaatgggtgctacttttcaacatgcatcaaaatactattattattatattgttatattaaagatgttttagtgtattttggaattgtttctttaatgttttctatgcatagaaaggtacactatatactaagacaaatatttgactatctgacattagatatgaaccatatccaactgttccaacttatgtacaaatttgacttaaagacagacttaggaacggaactcattcataatccagggactgcctgtgtattgaaattgaaatgctttcgttaccttccaaatctcaaagcttgcaagtcccttacttaggaatttgtagagcatggtttaaaaaaaaaaaaaaatgtggataattaatgaagtagtattggtctgagcactttaagacacagcccagatccagggtaggcttctgaactgcaccagatgatagaactgcatgcgaatattctccctgagcacataattaattccacagtttattaacgttattgtcagaaatgctctgcttctctatattttccctgaatgcttgtgtctgtctgtgttaacttgtttgctttgcttttttcagattcagtctgcacccatcctaacccatgaagatcccgttttacagctgaagagctcttaggagttctcttccagagcccttgtatttgtcctaaagatggggagagagggccgatttgggcgcctgtttgtaagtgcaggtgactaaaacgccatcaaaaggtagacactggtggaaaatggttttagaaggatggtcaggagaacacatcatgctcaattgctcgatcaggtgctttagtgtcatgcaagtgagatgagatctggagaaaggatcaggcacagacacgtactccctccctccccttggacctggcttttccctttgatatcactgtaggcacctgaaggactaagccagttgctattcctgggcaatttccttctactcaaaatagccaactcaaggccctcatgcctggcatgtaatcattgtatttaatggacttctgcatgtgtgagatgtttgatttataaagtcagttcaattattaagaaaataaattagcttatgaattatccagatccttgattttccctcctagtccagttcttctaattttccatattttgacttaatatgtagcagaccccctggttctagtggaggaggtgatcagaaccactagtttattgtcaccaccaattatcatctatggatttcaagcatagaggctctctgctctccatttccaagcacagtaacagcagcctggcaaaaaagccccaagccaaaacttgaactaggaacattctgtcctgaaattacctgtggttatcatccagaccataggccatagtcagcagaccatccaaataaggggagcttctgagtatgatttctgtgccttttcctgttccattctcccaccaacttctccatctttgatatgtaaccttcctgttttacatttcaggagattatcttatgtttgtgaaatgagaattactgattgtctcttgatcccctttcattttaattagaccctgcagaaacaacagaatacctgtcaccagaaactggaggatctttgcaactgggtaggacaggcagaaagaacactggtgggccaccaaggcagagccacccaacaggacctgtctgtcttgcagaagaaccaaagtgacttgaaggtcagtgtgagttaatccatttttttcattccttcagcaggtattcataaagacttgctgtgtgccagttaagaattgtgtccaactgagaaataagaatatgcaggagttactgcatgaaggggtgggaggaggaagaaggcataccaggcagaggcctctgtgttggacttgagataggaatgggatagatcacaacatagtcaaggaactgaaggaagggtagtttggctgggcttaaagaataagggaagactgatgaaaagacaaggctggagaggtaggtgggaactagattatgatggtccttttaggtcacagtaaggataatgggtgataaccaggagaggtaaaggaccagccaggcctcaactcagctagaatcatgctatcaactcttctttatagaagaatgatgtctctgaggataactcattgcaaaataaaaatctctgctatttagcatgtttatgggcagtttcctttttgctttcattaagtatttgcttagaaaattaaatattttaaaatttctttgcattggtttaggcttacaccttaagcaaactctagtcagggccataaatctgttgcagaaatgtcatcctagccattccgtctttgtactgttagagaggttagaaataccaaagtggaaggctctaccatccctcttttcatgtgttaaggatttacaagatgacattcagagtcatgccacctcatttgccagtgttgtcaaagacattgaagggttcctggaagagaaccagaccaagctgagcccccaggagttgacagctcttcgggaaaaacttcatcaggctaaggagcaatatgaggctctccagggtcggacacgggtggcccagaaggagctggaggaagcagtgacctcagccttacagcaacagactgaaaaggtatccagactgctgtaacacttgacatttaaaaaaaaaaatttttttttttttggtacccatacagaatgagagcgtagaatcacaataaagggctgctttaggatctggttggtgagtccatctttatttttacaagaaacatccagaagaactcttaaatcaggagtaattggtagggactgtgtgtgtgtgcacgcacacacgcacacacagagaaagattgctatctgtgtactcaatactctggctaattagaaaagcactaccttagttaggaagggtagtacatagtaagtacattgttacaatgagaatcatggcaccggggtaaccaaagagaaggtaaagtctgaaagggtcttctgcacctcccttagcactggcagtttgaattggaatcctttggctgtgggctctgaccctagtgaggaaggtagagaacatggacaagaggaaataatttacctgaagatgaattctgaaatacatgaatgtactacttgttaattaacaaatacaggtagtaaataaacaaattgacataacctattaactcaaatatttgaatcagaaaataaaatttgagagacaaatttaagaactcagtgttctgtttggcagacaaaaggatgagagaaatctgccttaatctgcctttccctttgggacgagcagccagataattgagtgtgactgtgctgtttctaaccctcccagtgtgccacatctgtgtacctatttcttaccctcccagtgtgccacttctgtgtccgtagaatggattctctgaagccttgctgcggtgggaggactaaatgattttttaataaaagccttttcaaattctggggtttgccttttttcttgatattaagcagtaaaacatagaagaaatttagaggtcattttaaataattattttttaacagattttagatgttttcttttttgtgtgtccaaagattttatatccagtcttagagcttttcttttttctttagcataaaaattttccccctctttacttaacctgtggttgtatagctgagcatctaagaccttctcacttaaattaactctgtggctttcagagtaaagcagcaaaggaactggcagagaacaggagtaagattgatactctcctggactgggtaacttcattgggatcatctggtggacagctgcaggccagccttccaagaatagagcagatctcaggagctggcctggagaaagaagccttggataccactgatggtcacatgggggtgaaccaagccccagagaagctggatgagcaatgtgagaagataaaggtaagaatgttagcttgtcctcgctatgctgggaggaatctcttctgctctggacaagtcaccatgacctccttacccctaaatccagtgagcatttctcagcacatatcttctttggtgtctcagcagccttcaacactgttagttttactagggctactgtaataaattaccacaaatttgggtggcttaaaacaatagacatttattgtctcacagttctgaaggctagaagtctgaaatcaaggtgttggccaggccatacctcccaccaaagcctgtaggagggggtcattccttgcctcttctagcttcaggttgttgttgttaggtgttgttgagtaggttccgactcacagccctaggctttccttgacttatggtagcaaaattccagtctctctctgtcttcacatggcgttcttccttctgtgtgtatttctgtgtcccttctccccttataaggacaccactgtattgggtttcagcccacccttatgacctcatcttaacttgattatgtctgcaaaaaccctgtttccaaatgaggtcacatttacagatactgggggttaagacctcagcatatctttatgtgggatacaattcaacctgtaacagacactgttggctgctcctcttgaaatactttctcccttgatttcgatagcactgctgtgccctggtattccttcttcctttcccctagccagcttttgagatactgattcaagattgtgccctaggccctcttctcatctttcagggtggtcttgtccactcaacaacacttcagttaccatttgcactaatgaattccatgtatatatttatcttcagcccggatgcctgtcctgacttcaaacctggacataaatccatctctctgcttacaacatggaaccccaagcaccttaaatcaaactatcctatttcctatgtaaacccctcccacccaccaatcaaacatgtttttcttcctgtattcccacttaatttcctaaactaaacatcactagattcctttctttctcctgccctgccataccaaataagtcatcaggtcccacatattttgcttcttatatctctttgaaagtcattacaactcttaatctccattgagatattagtatatttcagaccaccgtcagctttcacatgtattattatagaagctcctactggtctccttggctcttggcttttacccccagttcattccctatactaacaaatgatctctctaaaatactataaccctatctaaaacccttcagtggctccctgttgcccttaaggtaaagtccaaattctttaacacggcttacaaggccccccacaggatatgtacctagttacctggccttatctcttacctcccctcacacttgtgtctctagctatgttggtctctcactctcctctgggtctttgcatggtcttggaacattcttgcctctctggtgagggagggacccagctctgggttaatttttactaattcttcagatcttcgtgtagacttccctttctcttggaagtccttcaccacttcccaaagttagattatatgttatctcctactttatccttccctacatcgtagcatttcttgctctatattgtatttttgtctgtactgccctctatgccctaggcttaaaggtagaaaccatttcctgttcactttttatctccacttatttatttattcattcggtaagtattgtacacctgttatatgcaggcattgaagataaaccagtgattcagccagataaaccattctctaggacatatgcaggtatattatattgaatgattgaaaaaaagattatgtatcaaatagtagggggcagtactacatctttgtataacactcagatgcccacactctcatcctctgccatttagggtacttaaacacacatggatcacatgttttagtagtgatacctttgtagcaaaggaaatttgagttagttggaggacttctgttgaacagcctgtttgggccattgccttattttgtattaatagaatttctgcctcttgcatgccagttttgcacttggaagatccattgtaatgtgtccccaaagtctggtagtctgacactaacacagggcagagatggttctgtcagcagggaacctcctgacacctgctgacagcagtcagcctaactacgtagcatcttcatcctgggaagaaaactgcttactcttgggtagatggattggaggatgagcgtggaggcatctgggtgttatacagacaaagccgtagtactgcccacagctatttgagcgggatattatttgtcagcccagctttcctgagatgacgtggagaagctgagggctaccagtctgctgttgatacaagctaaaactggacagtattctggagaaaagcaggctagagcctctctctaggtagttgcatagacagtataggtagtcaggaactctgtctgagctctcactctcctctattatgctcaggaagaacatgatttaaaaaacacacaactgtctttaaaaacctatattccatgattggaatagaaaacaaggttctcatatatgcacatagacatagcatgtaccaaaaaagtgcaagctaactatactattcagaaatacaatttacttttcactgatctatacactgtctatttaagaaattaattttccaaggtatttcacagtagggacggtgttcaagaataatggatatgtgagtgacataattcacagctaagtatttgcaatttttatattgtcatgtgtatggcttttccagcttactctccccttccatgaacatggataattattagttgggcatttttatattcatttagagttaagtaagtggtttagtgaagagagtcaggttctggtcacagttctgtctcttaactgtgtggccttagttaagacatataacatctttctgatattcattcacctcatctttagtgagagtattatattgcccacccacattggagggttgtgccatgaatcagattagataatacatgtaaaatcactttgaaaactatgaagtcttgtatgtatcagttcacctggtattagcatatggaataatgcttacagagtggaaaatactgatgatttctgagcagctagaaaagtggcctagtaagatctctctctacctctagctgtaaacataaccaaatcattttagtttccttactgtcttttgttttggggaattattttccaggcccatcaccaagaattgctatcccagcagcaaaatttcatcctggccacccagtcagctcaggccttcttggagcaacacggccacaatctcacacctgaggaacagcagacactgcaggagaaactgggtgagctaaaggaacagtacgcagcttccctggcccagtcagaggcagagctgaagcaggtgcagaccctacgggatgagttgcagaagtttctgcaggatcatagagagtttgaaaactggctggaacagtctgagaaagagctggtgaacatgcataaaggagacagcagccccgaagcgcttccctcgctgctgaagcggcaggggagcttctcggaggacgtgatttcccataaaggagacttgagatttgtgactatctctggacagaaagtcttggacacagaaaacagctttaagaaaggcagcgaaccatcagcaactggaaacttagtgaaggagaagctgaaggatgcaacagaaagatacactgccctccattcaaaggtaaggaagaggttctttgttttcatggccaccctcgtacagctgttggtgcttctggggctcagaatctcaggacacaatgggtgagttcatttgtataatgacctcaggcggtaggtgttcagaagctctggcaaaaatgtaaaactgtagggccctgggctaatgtccgattttagcggtattggggtatgtctcaagcttatggtgaaagtgcgggtgcttaccttcctgtattccgaccagcaggcttgggtttccaagagacatatcacagggaatcttaaaccaattgcacagcgttggtttaagattcctggacagagcatctagggtaaatccttatctttctgttccaagaactccctctagctgctaaggtttagaatccagtcaattgtccttacctttgttgtactttctgtaaacatcccaaacctcccaaaaagactttttgtatcttttaatgcctacctttgcctgcaacctgatttatatttctttggtggcttgtcgtacaatttactaaatcttcctgagtatatagtaaggttggacgaatagtatagaccagtgaccatccctgttgtagaaaatgattgctactcatcaattggtagagctctagcactaatttaaacgtagttacagtgagttcttggtaacgaattcaggcctctttctttgggccgtacccaggaaacccctgcctttggcctggccttgcttaggcctcctttgtctcctttctttggtacagtgtacacagctgggctctcacctgaacacgttgctaggccagtatcagcagttccagagcagtgtcgacagcctgcaggcctgggtgaggacttgtgaggcccatgtggagaagctcttgtcagatactgttgcctctgaccctgggatcctacaacagcagcttgcaacaacaaaggtaagccgggatgcaggcaggggtggaggatcaagactttgtattgcatggcttagagtacttgaaacagtagcaaatacttatataggttaaagatagcagttaggatgctttgaacaaggtctgatgcctaaatactttgttctcatctctgactgaatgaactgaaaatgattctgtaaagctgcttagaagctctaggttcctagaaccagttttgattacttattcaagctctttttcttttcccctctttcatggacaagcagcagttgcaggaagaattggctgagcaccaagtacctgttgaaaagctccaaaaagtagctcaagacctcatggaaattgaaggggagccagctccagaccacaagcatgttcaagaaactacaggtacggagcagccacggctagcgttcccttaattcccgggccatgcctgtgttctgtaatcatcacagcatgctgtacaagtatctgtgctagactagggactgaggatataaagatgaatagacaggccatcattaagtagctttctctctcatgaactttgtgcttgtaccattgaaggaccttcacaatctggcttcagccccttttcccctggtactctgccttctagccacaccccacttctaccctttcacaagcagacagtcacttcattactttatccctgaagtttttcctgttgcttagctgctaacatttattgggtgcttaccatgcatgacgaaatcttactcatgcttcaaggtgtagccaagaagtcagtcattccctgtgtaaagttctgaccaccactaccactacctcccctgcctcaaaaaaaaaaaaaagaagaagataatcattcttccttctaggcttccctaccatagtgctcctagtaccaatatggcacttagaattgcatttttgtggttacgtagttgtgatgtgccttcctctccctaggctttgttttagagtgttaagtttgtagaaggcaggaaccttatcttaattatctttaggcctcagcatctagcacaacttctggcacttagtaggtgctaagtaaataatgcttattaaatttggctcaaatactaatgaacttcaagcttcttccttctactagtttgccttgatatccattattattattacttgtatacaatttaaatacacactttttaaaaacacaatacaaaaatagtctccagtcttttttctcctggccttgatttaccaggttccatactcagccgtttccagagcctttcccgtagtctggatgagcgctctgctctgctgcagaaggcaattgcccactctcagagtgtccaggaaagcctggagagcctgctgcagtccatcagggaggttgaaaataacctgggaggggagcaggtggcatcactgtcatcaggagtcattcaagaagccctggctactaatatggtaagaccgatgcccctggggttagcatagaggagggtgtgtttgccatgtgccatgattatattattttgaaaaaatatcaggagaagaattcatttccctgaatcttctagtaagatttagagcagatgactgatcatgtagagagatttctacccaattttcaaaccattgttgagcttgagggaaagtgatgacagtgtcatatgatggatggggtggggaactaagaggaaaagatgtatcatattctgaaagctcagtttcggtcctccaaccctgcttgaggaggtgagcatatagtttattagaagcttaatagtttatggctcagatatcccagagtaagtgaaccggagctgaccggcatgttcttgatggcagaaattaaagcaggacattgctcgacaaaagagtagcttggaggccactcgtgagatggtgacccgattcatggagacagcagacagcaccacggcagcagtgctgcagggcaagctggcggaggtgagccaacgcttccaacagctctgtctacagcagcaggaaaaggagagctccctgaaaaagcttctgccgcaggcagagatgtttgagcatctttctgaaaagctgcagcagttcatggaaaacaaaagtcggatgctggcctcgggaaatcagccagatcaagatattgcacattttttccagcagatccaggtgagcgtatatctgccaaaagaagggcagggagagagccagtgtttactgcatgagcacatactgtgtcagacagtgtgctgggaactttacctgctttatcttacagaattatcacagccatccttgaaactaggtgtcatttgcccatttttaaaaaacaacctagatttatttttcattcatattacgtgttcaacccagatcagcagacagactcagcacattgtagttgctgaaggacacaggttgttggtagaactgtatgttcagaataagttcctagagtggaggtgctgtgtcagaggtaaatgcgcatgcagttttgctagagagagccacgttcccctctgcggagactgcgccgttctgcacttccaccggcaatgtccgagaggccctgtttcccccacagcgtcaccaggagagtgtgttggcaaacttgagtgtttaccaatctgacaagtaaaacgtgatgtctcagtgtagttgtaatttcaatttctcttcttatgagtgaaggtgaatatatttttgtatgtttaagggtcatttatttctgaactgttggtttatgtcttttgccgtttcaagtttttggctttttttcctcttaatttttaagagtggttaaatattaagaagattagctctttatctgtaatatgtggcaaatattttctgccagtttgtcctttgtcttttgactttgtggtggtttctaccatctaaatttttggatttttttttttttagaatttttcatggttttggttgcatgtttatttttccatgtgaactttagaatcaccttattagttctagaataaaagaacttgttggtattttttattggggcacattagatttatttatacacacacacacttaattggcgaaaattggcatctttgtggatgtctttccatttgttcatgtctgcttttgtgtcttccaggaatgttttaaagctttttaaggttttctgtttttttgtggtggttgattcctaagattgtacgttcttgtgttgctattgtaagtaaggtgtggggtttttgctcttgatttttatatgttgattttctatcctgctatctcattgaatcatttcattgtttaatttagttgttaattctcttgagttttacaaacatacttttgtgtaatctgcaaatatagttttatctcttcttttccagttcttatactacagattttctcttacttaattgcattagctactgtcttcaatagagttttagtaatagtgaacatagtatgtttgccctgttttacagaagaggccatggaagtatagaaaaatttagtgacttaagagctcaagccatgtctgcacaactgtgtaaatattctaaaaccattgaattgtgcacttttgatgaatattatagtgtataaatcatatctcagtaaagctattggaaaaaaaaagggtgggggggtggggggaagctcaagccagtaagtggcaaagccatgattgaatgtcaggtctttttgattctaaaacctccgtttttttctttctgtcatgttgcctcccaagtctttgaatctttgttttaaggagttaagactcttttgtacatcctagtcattctccagcagcttgaagagatcctatgtgtggattggtttgacctagcagttgatccaaagcacttgcctcttttcttttttcacttatttataaggaacagagccctgctggcacagtggttaagcattcatctgctaaccgaaggtcgacggttcaaatccaccagccactcatcggaaactccatgtggtggttctactctgtcctttaaggtcgctgtgagtcggaattgactcgacggcaatgggtttggtttttttttttttttcgttataaggagcagagaatttacaacagttccttcatttgccttgacaggagcttaatttggaaatgcaagaccaacaggagaacctagatactcttgagcacctggttactgaactgagctcctgtggctttgcactggacctatcccagcaccaggacagggtacaaaatctcaaaagggacttcacagaactgcagaaaacagttaaagaaaggtgagttttcacataccttctggtcagtggcagaggctagtttttttaaatttttgggtgaaatgatttctctctcttctccttcatcagaaaaggtggcatgaagaactgagacacaggagattacagagtgcctgtttcaggcaaagctatccaatccactcagtgcttagtgatttttctgttactaagtaatgatttcctgctcagtaatgggctcagtttcctctcagtagaatcaagagcccaagtcacctgggccaaagagaacaaattaggggcagcgaatgggattatttgaaagaagaagaaaaattggagacttcccagacgtgatgaagagttatattgacactccctctgcgtgttttgaccacatttaacttgctgttttgagggaatgtccagattcttctttccaggcaaacaagggagtgtgacaaaggagccttatttcaaattgtcagctcactgttgaaaagccgtggttccctattaggaaccctcacgtgggtgtaagagcattaacaagacctcttaaacaaatcttcgtttcaccataaataatcttggtttagcagatgactgccttagtcataagatgagagcaattgctcaaacaagctctaagtgacctattgttggcgattcggttccaactcatagcaactccacgcgtgtcagagcggaactgcttcacagggttttcttggctggtggcacaacagctaagcactgggctgctaaccaaaaggttggcaattcaaactcatccagcggttccacaggagaaagacctggcagtctgctcccataaagattatagcctagaaaaccctatggggtaattctactctgtcacatggggtcactatgagtcaaaatcaactcgacaacacacaacaacagtaatctttacagcagcagatcgccaggcctctcttccacagagctttaggttggcagcatagcaaaacacttgtactgtcagggacctgtaagtactaagttgttgtcgtgtgccatcgtatcaattctgactcatattgaccctataggacagaatagaactaccccaaagggtttcctaggctgtaaacctttatgggatcagattgccaggtcttttctcttgcagagccactggtgggttcaaacccctgaccttttggttagcagcccagtgcttaaccgttgcagagtggaggggagggcataaaggccaagaagcctttgttttccttcccatatgcttgagaaccttttagctgtatgaggaaccaggatctctggcttgctgctgaatgatatgtgtggccatttctaaaactctgattgagttctctgtgatttattttcttcattggtgggctctgtctacagctaatcacttgacttctctgagcctcagtttagcatctcgcttgcttgaaaaattagcatttgaactgggccttgaaagagtcaaatacctaaaaagtagcagagctagaatttggatccaaggcctgcattctttccattgtatcatagtgcctaaatagcaggctctttttagcttttctcactttcactttagcccagaataagactgaaggctccttccctcaggaatggccaaacaagggcaacagattcctgcgtttgatgcccccctccattatatgtggtcatttaaccaaacctgctgtggcaaaaattgtggaaaggaaaggccctgctatgaactgattctcagagtcccagcatgaacctagacttagctcaggttgacttctttacaacacttagtctggcagctaacaaaacttcttcactgacagagaggaagatgcatcatcttgccaggagcaattggatgaattcagaaagctggttaggaccttccagaaatggctgaaggaaactgaagggagcattccacttacagagactttcaggagtactaaagaactggaaaaagagattgaacacctgaaggtaggtaaatagaagtgtctccaggaattgtgctatacggcagtttagatgcttgtttggactcatctcctaatgtgctagggaggtggaatgagacatccaggttatcagtctgcttcagaaggtgttcctcccttctttttatgtcattgccgtctgtccctacccaagaactgagctccataaatatctcctattttcaaaaacaaaaacaaacaaagaaacttccaagaataaaatacataaagtttcagctctttcttgggtgcctctggtgcgatggtgaattatataacagacatttgtcaaagtcctttgacaaaaagaagcttcttactctcttttgtatatttgggaattagacaaatgtatatgagcaagtaactaagtaaatgatcaggaaatcgaagagaaaagcgctagtagcactccagctgataatagcactccagctaataaaggaaaagttagaatcagatggtcggaaggtaccttcagggcacctcctcccaccccctaaaggaaatcccttctgtattatctttgactcgtagtcatccagcctcttgcgcacacctctaacatatctcttgtttttgttgaaatcagccaaatcttcctccaactgactcttacacattcatccttaggttctcagtaaagccggctttatcttgagcagatgaaagagaagtgtttgagtgctttcacagagagggtgccaggagcatttggcagaagttcccaaactttcttggtctgtagtgctcttagtatttcagtcaatttttcacaggcaccccaggtccaaacaacttaatagtagttgttcacgtggcatccagcagatgtcagtgtgtttccctcaaaagtttaaaagatcctgtgagtcagtggcagcttggggactgtggccctgtggaatcaaaagttttaacaaaagaaatgacaagcagtgaccgagggtgaatgtgaagttgggcagcgtgggtttactggatgtaaatggttctgtgtctttctctgctgctattctgcagcttaaaaccaaaagcaaactaagtaaattgtcagggaaattcagtatggaggaagagaatgaagactaagacggtagtcctgctttgaaaggagtacatttctgctgtggcaggtgatccacattgtggagattttgtaccaccgggtaccttgtcatagcagatgctgttgtttcctaacagctttatgtggtaattaaaactctactaacccaacctaaagttcccttgataaatgcaaagtgtagtctatgattctatgtatttttctacatctgaatatctggctctttattaccatttcctcatattctttacccacatccttttgtccaccttgcaaactcgtgtcttaactcaaagctttccacactctgtgctgagttaaatgtgtctccttttgtgctttcagggtttactgactttctatttttctgtagtagcatttatcatattataatgcatttgataacctgagttctgcgttttaggaattgtgtcgtaatccttttttgtatccccagtgtctggcaatgatgcctggcccgtggtaaatgctcagtaaatatttgatgaatgaatgaatcagaaggtcctgaatattccatgataccattctcccacaacttggctggctaaaccaggatcttgaaattgctgaatgtatgagtatggtcttaatgcttgtcagactttaggaattatatagagaagaacaagtgttccaatttatgatgaagagaagtcctcagatgttacatttagccattttgttctttaaacagggtctcctagatgactgggcaagtaagggaaccctggtggaagaaatcaactgcaaaggcacttctttagaaaatctcatcatggaaattacagcgcctgattcccaaggcaagacaggtgaatgcagtctctcttcctttgattggtcagagtcaaagctggatatgaggacaaacaaacaaacaaaaaaaaccccactgctgtcaagttgatttcaactgatagccaccctataggacagagcagaactgtgccatagggtttccaagggttttttttttttaatgtctcatagggtttctttatggtagcagactgccacatctttctcctgcagagcagctagtgggttcaaactgctgaccttttggttagcagtcatgtgctttaacccctgcagtaccagtgctccttatatgaggacaaagggatctacaaagcagttccccctcccctccccccagcctaacctgttctcccctttttatgtaataaaaaaaataattttttttatgtaacattgctgtattttgaaaaattctttcccacgatgagaaaagtaaatggactagttggctcacttagaactatcaagtaaacatggaaggattaaaatgtggtttccattttgaggaatttcttttaaacatgtaaatgggatgtgtatatagcatggtaaacgggggtcagccctggctctgcaaagtatgatatccagggagaaactgggtacttgagagtgagtattggtacaccagggactggcatacttcttggaagggggcataaagactgtgcccaggcgtatgaataacctctggctacaaattaagtctctcaaacaaaatccaatataaatcagttgtcagttgtcgattgttaattgagatctcatagattttattaccagggtatgttagttcactcctgttgtcacttaaattgataaaaagttttctatttccctttggagaatggctgctattttgtggtatcctaaagtttaaagatctcttgaaactatgcagaagtgacaacattttaagggattggtaattcttacagtcccacttaaattgataaaaagttttctatttccctttggagaatggctgctattttgtggtatcctaaagtttaaagatctcttgaaactatgcagaagtgacaacattttaagggattggtaattcttacagtccaacccataaacctctgaagccagtgaattagtgtgtgagtagatgataggtcagcaaactttttctataaagggccagacagtaaatattttaggcttgcggtctgtttgggccaccactgcataactctgccactgtggcacagaagcaactgtaaacaatacataaataaatgggtgtggctatgttccaataaaactttatatacagaaacaaatagagggccagatatggccagtgggctgtagtttgctggctgttggacttgatcggtggtttttcaaactttttaaagcagattctagaagcttcctttttatattaaatctcataaaacaaatgcaaatattttttgcatgaatttcccttataagttgattatagcatttctgtattatgtgggtagaaacctttgagaagggagcttattggctgacagcttcaccatctgatttatttctgaatttcatttgatctcattccatctagaaaatatggctcacacagataagtagttgtaaatgatatgtttttgaaagttcactttacaatcttggaatactctgattaaactgagctagaagcacgactcaaaatgagaagaaacagctgtaaacatctattaacaggaatgtggaatgtacaaagtatgaatcaaaaaaattggaagttgtcaaaaatgaaatggatcatttaaagattgatatcctaggctttagtgagctgaaatggactggtattagccattttgaatcagacgatcatgtggtttactaagctgggaatgacaaattgaagaggaactgcattgcattcatcaccaaacagaacatttcaagattatcctgaaatacaaagctgtcagtgataggataatatccgtaggcctacaaggaagatctgttaataagacttttattcaaatttacacaccaaagatgaagagattgaagatttttaccaacttctgccatctgaaattgatcaaacatggaatcaaaatgcattgataattactggtgattgaaatgcaaaagttggaaacaaagaaggatcagtagttggaaaatatggccttcgtcctggaaatgatgcaggagatcacatgatagaatttcaaagaccaatgagttcttcattggaaatacctttttttcaacaacataaacggcgattgtacacatagacctcaccagatggaatgcacaagagtaaaatcgactatatctatgaaaagagacgatgctgaagcccagtatcgtcagtcaaaccaaggccaggggccaattgcagaacagaccatcagttgctcttatgcaagttcaagttgaagctgaagaaaactaaaacaagtccatgagaaccaaagtatgaccttgagtatatcttaccagaatgtagagaccgtgtcaagaataaatttgatgtattgaacactaatgacccgaagaccagatgcgttatgggatgatatattaaaaaagtagtacatgaagaaagcaaaaggtatgtgaaactagtttgcgctgtaaatcttcatctaaagtccagttaaaaaaaaaaaaaggtcattaaaaattcagaaaagaaaaagaagaccaaaatgaatggcagaagagactctgaaacttgctcttgaatttcatttgatctcattccatctagaaaatatggctcacacagataagtagttgtaaatgatatgtttttgaaagttcactttacaatcttggaatactctgattaaactgagctagaagcacgactcaaaatgagaagaaacagctgtaaacatctattaacaggaatgtggaatgtacaaagtatgaatcaaaaaaattggaagttgtcaaaaatgaaatggatcatttaaagattgatatcctaggctaaagcaaaaggaaaaaatgatgaagtaaaagagctgaacagaagatttcaaagggctgtttagagaaaataaaatattataatgaaatgtgcaaagacctggagttaaaaatccaaaacggaagaacacgcttggcatttctcaagctgaaaaaactgaagaaaaaattcaggccttgagttgcagtatttaaggattctatcggcaaaaaattgaatgacacaggaagtatcaaaagaagaaggagggaatacacagagtcactataccaaaaagaattggtccatgttaaccatttcaggaggtagcatatgatcaagaagtgatagtactgaagaaagaagtccaagctgcactgaaggcattggcgaaaaacaaggcttcaggcattgacaggataccaactgagatgtttcaacaaacggatgcaacgctggaagtgctcatttgtctatgccaagaaatttagaagacatctacctggccaacctactggaagagatccatatgcatacctcttccaaagaaaggtaatccaacggaatgggaaaattatgaaacagtatcattaatatcacatgcaagtaaaattgcggtaaagataattcaaaaacaactgcaacaggacatcagtagggaggtgccagaaattcaagccgaattcagaagagcacgtggaaccagggatatcattgctgatgtcagatggatcttggctgaaaggagagaataccagaaggatgtttatgtgtgttctgttgactatgcaaaggaattcagctgtccttttttctttttcttttttttgtccttttaatgtaacattacatcctgaatacttttcagattttcgtatgatctttataattatatgatacgtttttgtttcaacttgggaaactgctgaaatacagggaatcaactaggggagaatataggtgaaattgtagtaattagaaacagaagaggccaaagcagaatttttgagagtgtttgtgagccacacttatttggtacttagaatttctgttttctagtggggggaggggaacaggaagaggtcacaagaggaaaggcagagactcttcctttcggaacaatataagatgggctcattttaatgtctttattaaaagaatgttgctttttatgtacttaattgtacttattgttcatttttattatattgaagcacattaatgttaaaggtgaacctttttggctcttattataatcctcattccaaaatgtggcagataccattctaacaacttaataatgttacccatacttgcgtcagaaaattaaggcagtgttgtaaatttaagaaatttaagaagagaatttagatttccttctagaaaggattaagaatcatcactgccagggagctgtttctcaactcgaatgacactttgttgtctggtagctgaaatgatctgtctctttccatgagtatgttgtcttgtgctgtgttaactttttgatacccaagcttaaagtgagtgccaaagaacaaattcagtgcctgtttgtattcctaacacgtttgtcttgccctgtttgtctccctgtccttctgctcaggttccatactgccctctgtaggaagctctgtaggcagtgtaaacggataccacacctgcaaaggtgagaacaccatatcaacagtgcctctttgttgggtgtgttaggacagggttcatgtgtgcacctgtgtacgtttccatacgtgtggaaaagctgctgccaggatgggtgcgagggtaaaaatctgggagaagcagctgtgatgcctctttgtttgctggccataggctaacaggttggcagctggtgaagctgaaagtacagaggagatagaatggactactagataggaccagtaagaaaagaccttgaagaaaatatatacaaatcttagtgttataaagcacctatcccaaaaccaaacctcctgccattgggttgattacgactcatagcaaccctataggtcagggcagaagtgccctatagggttcccaaggctgtaaactttacagaagcagattgccatgtctttctcccatggagcagctggtgggtttgaaccatcaacttttcagttagcgcccaagtgatttaaccactgtgccgtcagagctcctataaggtacctatactaaaggtaatctagtttagccctcagcccctcaggcaggtgacttctctgtagtttgaagaaaagagacagatggagaagagggagggaatgcccaaatcaattaatcccaatactgcactaacgttaagttctttctcactcttctcacttttgctatccccatgtttattaagcattttaaggtgattatctgacttttttttttttttatctgactatataatgccaaaattaggaagcagattaatgaaagctcttttgctttgtgtatgtaaacatcaacttttatgtcatctacctgaagaataacctccagttcactagaagatgtaggagagatgcctaatcctgaagagtaatttaggagtaaggaactaagaggggtgcttctagagctattcccaatctgatttctgtttctatgatactagatctgacggaaatccagtgtgacatgtcagatgtaaacttgaagtatgagaaattggggggagtacttcaggaacgccaggagagccttcaagctatgctcagcagaatgcaggaagttcagaaggaggcaagctcagtgctgcaatggctggaatcaaaagaggaagtcctgaaagccatggatgcctcttcatctccaaccaaaacagaaacagtgagagcccaagctgaatctaataaggtactgtgtttacattagctgcatcccacacactaaggggaacggactgacctgaagaacatttgctatatccaggttcctgcctgagtatgggaatctgagaatgaaacatggccgaccatccagcctacgatgagcaatatgtttgactttcaaatgattactatgctttaactctcctagagaattttcttacctgtgaaattagaaattgttataaatcagactcagaaacaaaaccagatctgtttgcagaaagagaatagtcctccacagtagcattagctcattgagaatggaatctcgttttctatatgatactggaagagagcaaagccattctcatcaaagcatgtttccaacaattgaagtgatctaaatagctgtgattgtagtttattcttaagataggcatgtgggactaggaaaaatgtcagaagaaatcagatcgtattaaaaaacctgtaagaaattttcactgaagtttttaatattcctgttgagcatagcacgacatcttctcaaaccataaaaacatcatcaccatcatatcttgacacttttcgtttacaagaattaataattccttcttatttggccatactgatgtattatacataagacaaacttggatcctgctatccagtttttcattttaaaataaaaattgaagcagaaaggttaaatatcttataatcacaaagcaagtcacaggtagagttaggagtagagtctataattgttgcctggtcttccagtcatttctacaacacacacagctttgtttcctgtctggagtttcatgacatacatgatgtttctttatcctaggccttcctggcagaattggaacagaactctccaaagatccaaaaagtaaaggatgctctagctggattactcatgacatatcccaactcacaggaagcagaaaattggaagaaaatgcaagatgatctcagtaagttatcacaggggtattgcaaatttactgaattatttatccttaaagcaaacacaagatttcagcaaatcctataaagcaaaaattatttttagttaattttcataagcaagtgaggggcctggatagggtcagagagtgagcctgattaggaaaaaaaattagaaattccactcagagtgtcagaagttgggctttcttgggcaagtcaaactgatagtctgctgtgatcaagaacaaaagagagcattgatgataaaagtgaaaatgtattgatgataatgaaaaaaggaaaataatctccataacaatgtgttcataatattgagctgtaaatggtgcaggtgaatatttattggcctgaaagatgttcatgatacagtaagttaaaaaggattataaaacaatatttgtagtgtaatatagtttctaaagtattaatgtttgtaggaaaaaccctagaaggatttgtaccaaatattaatggtgattatattatcactcagcggtaggattatgggtatttttattttattcttttggtacattattattctaatttctctgcaatgaccatatattgattttttttaactttttatttaaaataatttgtatattcacaggacactgcaaaacaattttatagggagttgtgcctttcacccagcctctcccaatgataacatcttgtataactaacacaatatcaaaaccaggaaattgacatgggtgtaatatacagagcttattcacatttcaccagttttacatgcacctgtgtgtgtatgtgtatgcttcaatgcaattttgtcacatgtgtagcttcacgtaacctaccaccacagtcgaaatgcagacctgtttgtattgctgttttaatttttttttaaggggggaggggctatttttattgtaaaatatttaaaataatgttccagggatcatttcctgtattatattaagaacataatttagggagcaggcctagttgctgctgagaataaaggaatacattctctcatttcctgtctacagattcccgatgggaaagggccacggaggtgactgtggctcggcagaggcagctagaggaatcagcaagccatctggcctccttccaggctgcggaatcccagctccggccgtggctgatggagaaggagctgatgatgggggtgctggggcccctgtctattgaccccaacatgctgaatgcccagaagcagcaggtccaggtgagcaatacaccttaatgctttagagcaaagaaattagagtcttaggagcctgggttcaaatgctgcttccagcaagtagatgtcatatgaccttggacaagtcatctagcctctcagagtcttgcttttctcactttaaatgagaagtttataaggttcttaccacggtacttgtcaaatagtaaacagttaataactgtgttattaatatcattaacaaagatagtaaaatgagtggatatgagaatggggaactctttgactaaattactgaattatattttacttttaatccttagtggtagtgctccatattacttaatgcaatatctgatatctgctgtctttacttaaagattttcttttgatcaaacctcaacaaaattgattcaagtgcccaatgtcatagaaatttagattggtcaagattgtcacagttgcctaaggttacacagtacgttatttccaatgaaatcctgcctagaaccttttccttgttatcatcaataagtatttgtaaaagctgttatattgggtgttgttccatgaaactgatgtacacatgatttgccaacaaatctaaggaaaaattgatacaatggcagggcctagagtataaacgaatacatgccagattgtactttattattacttttgtatatatgcacataagagatttattagttaaaagggtttatagtacctacatcctcccccaaacctgttccatttcttcgtaccatccaccaattttctcactcatatatcccttaattacttttaattaagacctgagagtaatatttgaaaaccttttctttcagcctctgtatccaattaattactaaatcctatttagtctacattcaaatatttttctaatccagttgttttcaaactttttggtctcaaaatcctcttacactcttaaaaactattgaggaactcccaaagaacttgtgtttatctattgatattgaccatattaaaacagtgggacattttaaaatatgcgttttttaattcatttaaaaataacaatgataaaccatcacatgttaacctaagtaacatttttaacaaaaaaatttttttttccaaaacataaaataataagagtggcattgttttgcatctttgcaaatctctttaatatctgacttgattgaagattctcatggattctcatatctgcttctgcattcagtctgctgtgataccagacacgtagcctccagaaaacttcatcgtacactcgtgacagaacagaactttgaaaggcagatagcattttagtattattatgaaaatagttttgacatcctggactccatgaaaaggtctggggactcccaggagtccctggaccgtgctttcagaatcactgttctaatccctctctcttcttcgttctctttgctgcttcctcatttaggattatcctgttctagaccattgcagcagcctcctaacagatttctttctgtcaaccgtccacacaattatcagattatgtccttgaatcacatatctgaatatatttaaatgtttcagtggcttttggctgcctgttgagtaaaggccaaatacctgctgaatgcagtctataaggcttttcacaatctggtcccagtttgtcttgccaacatcatttccatctattcccccatatacccaggtttctacacacacaagatagtttgttctttcctaaaacatatgacacttacacagctctgtgcctttgctcatactaggcatcctcctagaatgcccttcacaagccttactctgctctttttggagaactactcattcttcattatcacctatctgaagccttccctgatttccctctcctaccatttgtcatccccagcagttctaatcgcccttactccatgctttcacaataccgtgttcacattagtgttttaccatccttttacttttgttacattttattataattgattgtttacatatctttttttcctggaggtcacgtcttccttgcttttgtactatgtaagtgctaagcactttccataaattatctaatccttacaacagccaagatgagtactgttactatcattttacaaatgaggaagctgagatttggagaacgttttaaaaagttgcttaagcttatacagctagtgagtgtgtgtcagcttgtcatagtgtgggggcttgcgtgatgctgtggtactggaagttatctgcaggtattcaaataccaacaagggtcacccatagtggagaggtttcagctgagcttccagactaagacagaccagaaagaaggacccagaagactacttctgaaaagaattagctagtgaaaaccttaggaatagcagcaaaacagtgaatgatagaaccagaatttggacccaatcagtctgactccagaccctctaatcctaatttctttaatgagtactgcagagaatacaaaagaaataaagagacatggtccttgctttaaagaatctcattatctaattgtgctatattgtaatatacagatatgtgcctttgggattacaagaaaacagaggtattaagaggtaaaacaacaaatccaaccagtaatagagctggccctgagatccagggtttcaaactcccaattcagaggcttgagtgttgcatggcaaagctgatgagtaccaatccatggagcaaaccagtttcccaacctagaccatccttaataactgatgttgaaacagagtaggacaaatagcataatcaatgatccctttgaaacaagtttttatcaagcatttgttaaatactactgcatctgtctatattgcatcagtctatagcctggtccttggagtttttcaaaagggattggcaatatttggcacaatccgaaatcagattttgttttgacactgcttttagacctgtcttttctttctaaacatcttggtgttgtttctgtttcagtttatgctgaaggaatttgaagcacgcaggcaacaacatgagcagctgaacgatgccgctcagggcatccttacaggccctggagatgtctctccatccaccagccaagtacagcaagaactccagagcatcaatcagaagtgggttgagctgaccgacaagctcaattcccgttccagccacattgaccaagctattgtcaaaagcactcagtaccaggaattgctccaggacttatcagagaaggtgaaggcaattggacagcgactaagtggccagtcagccatcagcacccagcctgaggctgtaaagctgcaattggaagagaccagtgagattcgatctgagttggagcaattagacaatgagattaaagaagcgcagacactgtgcgatgaactttcaatgcttattggtgagcagtacctcaaggatgagctgaagaaacgtttggaaactgttgctctgcctctccaaggtttagaagaccttgcaggtgagttggggtgaggaacacatttctgccactgttaatggcaaacagaaaggagtgggtttgtggtagtctcaagaacccagggtgaattgctgaacatattgatcaaagattctatagaagaatcctgatcaaaatggggaaaatgcagaacagaatttcacattctcatggactccagactttctggagccatggaggctggatgaactccaggaactactcccctgagataatctttaaaccttaaaccaaacagtagtctagcttaactagtcaaaaatttgtgccttgagcattatgctcttttaagaactattttatgggatcaaagtgacaagagcaacttgaaagatgagatgggaaccttaggggacagtgagtttatttaacaaggaaggaacaactcagaaaaagagggcgagaatggttgcacactgaaggatatataatcagtgtcatcgaattgtacatgtaggaattgttggactggtgtatgttttgctgtgtatgttctcaacaacaacaaaagagtctagggtgactcttacatagcttttgggctcaaactagtgccaaaaatcccctcttccagctacagtgagaactgctgtggttattacacattgcttaagcaccagcaagatgtgaagctttacatagataagagctcaaacataatttcagccaacagttagagagacacgctcatagatatatgtacagttggagttacatatatactttcactgatactcattttctttatattcacacacatatgtacacatacaccaataattcaaagttagaacatgttccggacttcttacggtggccttgttcattcattgcctctttctctggaaacatttataactttcactttttaccagtttagaagtaaaagtttacttctgttacacagactgccttatgaggttgatgtgagtattaaataagatatatgaaggagcttagcaatgtgcctcttttacagtaggccctcagttaatgttagttttcttttcctaagattagaccttctgccatgctcaggcttgattgatttaaatttcattttctcatttcagctgatcgcatgaacagactacaggcagctcttgccagcacccagcagttccaacaaatgtttgatgagctaaggacctggttggatgacaaacaaagccagcaagcaaaaaactgcccaatttctgcaaaattggagcgactacagtctcagcttcaggagaatgaagagtttcagaagagccttaaccaacacagtggttcctatgaggtgattgttactgaaggagaatctctgctgctttctgtgcctcctggggaagagaaaaggactttacaaaaccagttggttgatctcaaaagccattgggaagagcttagtaaaaaaactgcagacagacaatccaggctcaaggactgtttgcagaaagctcagaaatatcagtggcacatggaagacctcatgccatggatagatgactgtaaagccaaaatgtctgacctgcaggtcactctggatccagtgcagcttgaatccagtctgctaagatcaaaggctatgctgagtgaggtggagaagcgccgttccctgctggagatattgaatagtgctgctgacattctgatcaattcttctgaagcagatgaggatgatatccgggatgagaaagctgggattaaccagaacatggatactattacagaagaactacaggccaaaacaggattgcttgaagaaatgactcagaggctcaaggagttccaggaaagctttaagaatattgaaaagagggtcgaaggggccaaacaccaacttgagatctttgatgctctaggctctcaagcctgtagcaacaagaacctggaaaagttaagagctcaacaggaagtgctgcaggccctggagcctcaggtagactatctgaggaacttcactcagggcctggtagaagatgctccagatggatctgatgcttcccagcttctacaccaagctgaggtcgcccagcaagagttcctagaagtaaagcaaagagtgaacagtggttgcatgatgatggaaaacaagctggaggggattggccagtttcactgccgagtccgagagatgttttctcaattggcagacctggacgatgagctagatggcatgggtgctattggaagagacactgatagcctccagtcccaaattgaggatgtacggctattccttaacaaaatccaagtcctcaagttagacatagaggcctctgaagcagagtgccggcaaatgctggaagaagaagggactctggacttgctaggtctcaagagggagctagaagccctgaacaaacagtgtggcaaactgacagagaggggtaaagctcgtcaagaacagctagagctgacactgggccgagtggaggacttctacagaaaattgaaagtactcaatgacatgaccacagcagcagaggagggagaggccctccagtgggtagtggggacagaagtggacaccatcaaccaacaattagcagactttaaagtaagtcttgtgcttgttttttaatcttttctgtctaaaatgtgtatatttcttttcttgtaacttggaaaccgattgaatactgtgtacatattaacttctgtccctggtttcattattctcacttccatcaccatcaaagcacactgttcagagactaaacagtcttttggacctctgagcaaactggcttgaacattcttctattagagtttatttcagtttttataaccaatttaggatatagcgagaattgcccaagccttatttttatgatttcttgagatttcaaattcacggattttataaagcagtgaatgtttctttagggccatgttttcaaattgaagtataagaagccataagataaaccaaggtttatcttatttctgaaatactgattttagccagatttggggagaaggggttattgatgtattattgatatcttatggaataaaatgcaaaattctcatgaattactaagctgaaacatgatgttctaaagaaatttcccatttacagcaaacagcttaagaatacactccaaactccttgaaggtgtaagttttctgctaatagagtttgagaagcactgccttaattgtaaaactatttcagttctctgcctgagtcagaatttccagtcctgagattttgtgagtctatattaaaacaacagggaaatattagaggacttaacccaaaagtgctcatttgctgggtcaggggcttggaactgttaagactgtctcttcaggcttgctgtcactgagtgagccatttgccccagagtttcctttgttgtaagtacctaaaggtttctttctctgctgctggaggtcattctcctgctgttcccttcttggtacatgggatagatctggaaaggatacttccagcactttatttccaccactagccttaattattcctatttacatacttagcactgccacccaagtaaatttgttctctcagagcccctgcttgtcagaattcttcctattaaagagttgacaccaggtcagagccatgtagtccccagaaaggtcacagcttcgtaggcaagctccaagtaagaaaggtgactgtctcagaaaggcccctgcaagcgcttaggggatgttcagcactaacgtggggctttggctgaaggccccattaccatgtttggagacggtgcagtttggagcaacaaaagttgttgcatctgagttttctgaggcattcagataaggaaggggtagatagaaaaaattcaaactgacgagccgatgtgtgttcctcttagaaattcacatctgcgatcacacagagatcacctcacagtggcggtatggccttctttgcttcagcatgtcagcttttttttccttgaaagcagaggctgtctcttctactggcatacttcatttatccaatttacttggctctgggttacttaggataaacggtataaccaactaaattaatttcttagaaaactgaagcttatcccataggctccaaaatagttttatctaaccagattctggtttatatgggggattatatagtctaactttctaaacactgtattgtgcataagtttttctcaatgagtccaggttaacgtaagaaaaaagattatgctgttctctaatgtagtgaaatcctcaaggatactagaaatatttggggctgtttgtctttgtattaaatgctcgtaaatcactgtgctgtttgagttctgtactgaggttctctttttgagcccttacattgccttattcattggattggctgtgtgcgatgtgtgcaaggggaggatggtttctgtcttttcccccactactgtggtatctgctattatttcttactgctgtcactgggtctacctttagcagtctgcccttctaatcttcagtgagctaaaaaataaagtaaccaaacctgttaaaattgtgtgttgaatatgaactagaatatatgaaagggtccacacaaaaaaagagttgctgtcaagtcaattccgactcatggcaactccatgtatgtagaatagaactgcatgccatagggttttcaagaagactgtgacctttcccaaacagatggccaggtctttcttccaaagagcttctgggcgtattcaaccaccagtctttccattcgtagtcaagtggttaatcatttgtgctacccagggactcctgggtatttggatttgaggacaaataatgttttctttttcactcaatccttggtttctggaggcattctgaatttggtgttgcgaaaaaatttcaagaaattactgggcacgactatattacatttgtatcctaatgtatcacctcataatgctcagagctcagtagctgcttagttgcttgttataacagacgtgtttcactgattcctaagaagcctctatcacaaatactatggatgtgaaggctgggattggacactgatcagcaggtcacctacagagtctgtttatttgcagtgaagaagggaggagagaatagtgaaatgtctgtgtagaaaaactacccttgtgacccatctgtaagtcagtaaaaacaacaaactcgttgccatcaagtagattccgactcatagcaaccctataggacagagtagaactgccccacagagtttccaaggagcacctcgtggattcaaactgccaaccttttggttcgcagccatagcacttaaccactatgctacccaggtttcactgtggtagttataaaattatcagtatccctgaagttggggatgtaaattagaagcccagttccaccattccaccttacagagaagttaaaggctttgggaggagtttttgcctcctcccagcaagtctttggtcaggaggggaggagcacactcttggcttagctcatgctgagctcatgggaagtgaaaacaattagaggggaaaagccatgtgtcagttccacagttccttagaggctgagtaaagggaaggtctttttggacccattctgaggactgagtcattttcatgatttgaatgttgagttcctggggtattgtgctgtgtagttcagcaatagattaatcttctctcacgctggcagcagaccaaaaccaaaaaccaaacccactgccgtcgagtcgactccgactcatagcgaccctataggacagagtagaactgcccgatagagtttccaaggagcttctggtggattcgaactgccagccttttggttagcagccctagcatttaaccactatgccaccgccaccagggtttccaaccagatatgataaagggtgactcggctttcagattcaaacaaactgtttttaatgaggaaaaaacagcactagatttttcagctgtctctttttttaatgggatcatactttcagtacagaatctgcttaagaggatatgaatctgtgagacaggaatgtaggctctgctttgacctggctaactctattggggatagtcgtaatagacatcttagatgagtcaagtctgtggaggaccccaggctttcttgggactgtgcagtagtgctgataatccttggagaggcagtctgtaggaaaaattatttcctccttaaatgaacatgaaaagctggcaatcattattcctcagaaaggcttttcccttagttgcttctgaataatcgatagaaaatctggtcatccagtgcgaacctatcagatgagaacggaagagagtccatttccactctaaacaggaaaagacctcggactttccagaactgggacctttactcagttctgaagtagaaaggaaaagcctttccagaaatcacaaatcagagcattgagcatgttttcagaaaaccggaaggaaaagatttatctttggctaatcttttcaggaaattccgttttcctgaataaaagagtctctgattagtgaggaaaagtaattgtttgtgcctaacaggagactaacaagaaaggagggaccttcatttcattggaacttgagaagaagtatccacctagggtgaccttcctgagattggtaggaagagatttgaaatttggagaagaaatatatttaagtctgatgataacaagaggctaaccttattttgaaattctgtatgtaggttttagtcgtgaagaattggcatgattctgagccttaaaccaagccctccctcaaaccccccatcagcttctcatgaaccctgtggcctctcagtcagaaagtacgtggtggttttggtatcatactggtgagcagtatgaagaaacctggataattcactctgtaatttatatgtactatgtgattaaaagaaggagccctggtggtacagtggttaaaacactgtgctgctaactgaaaggtcagcggtttgaaaccaccagccactccgtgggagaaagatgtggcagtctacttccgtaaagatttacagccttggtactaatggaccacatctaccacagcctccaccagactgagtccagtacaactaggtggtgcctggctacgaccactgaatgctctgacaggcatcacagtagagggtcccggacagagctggagaaaaatgtagaacaaaattctaacccaaaaagaccaaatttgctggcctgacagaaacgggagaaacgctgagagtatggcccttggaaaccttttcagctcagtaatgaagtcattcctgaggttcacccttcagccgaagattagacaggcccataaaacaaaacgagactaaaggggcacaccaggaggaaggactagaaggcaggagggaataggaaagctgataatagggaatccaaggttgagaagggagagtattgacatttcgtggggttgttaaccaatgtcataaaacaatatgtgtactaactgtttaatgagaaactagtttgttctttaagccttcatctaaagtacaattaaaaaaaaaattacagccttggaaactgtatggggcagttctgctctgtcctatagggtcgctatgagtcagaatcaactgggagttgggctttgagagtgattaaaaagcttggctgctaaccgaaaggttggtggttcaaacccaccagctgctccatggaagaaagatgtggcagtctgcttccgtaaagatttagccttggaaaccctatggagcaggtctactctgctatagggtcactatgagtcggtatcaaatggacaacaagtatgtgttcaggccaggcttcagacttggcactgtatctcttggtgacaaggaagaccaagtggaaaaaattgaaactttttagggtccatgtgtttctcacaaaggttcacttcacctaatggtacatttgaatcacccaagctagtcagtcttttcccaccttgtttctaaggctgggctggtgggatgtaggtgggacagcaggcttccctaggactactctcccaattcaggttgagcagagcccaggctcagggaccacatatacttgctgcattggtctgagggacctagatatcctatgaaaccagaacagaaagtcctgtaaaaactttgatttgtttttttacctcatgatagcaagcttactcttcccagtgagcaatgtgaaaacccttgggaggcagaacccaacatggagctgaaaaactgccagtttgcacagagatacttactcctccttttcaaataattacaaagacgacagtatcagcccatctacgtttttgccagttagtgtacttccctgagaaagactcactagagaataaagcaaatgaagtcaaagtatctatctgcccttggagagaagtaaaatcaaacttggtttgacctgtctgtcagctggaggtttagataccttcagctttacagcagccaagataagtggagtagcctccccactgccctcccagcttggcttgtgctgatgcttggcctatcttttcttttttatttttcctttcttccttaaaaaaggctattccaacaggaactagggtccaaggaagtaaagaaaatatcctagaacatgatctctcagctttggcaccattgacattttgggccaggtaattccttgttggcggcggggtgtgggggggcgggggcggttgtcctgggcattgtaggatgtttagcagcatccctaaccactacctacgagatgccagtagtaaacccccagttgtgacaaccaaagatgtctccagacattaccaaatgtcccctaagaggcaaaattgccctctatttgagtcactgccttagaagaaaatcagcacctacgtgtgggaaatttaggattcagttggaataggtgctagttgattaagttaaatatttacatctcaagcagccttctgataatctgattatagctgtgtgtagtagcaccaaccccctcttagtcagccttggtttaggccaggccctagattctttatttttgctggtgctaatctgtgtgacttaaaacctcctagtcactttccctggcatttggagcttagttcttgtagcattgttgatgcaggtgtttagttgatgatgcatttctaacgagaagaggaacttccattgtggaaatacttcagggagcttccttgttctgtgtctttaatgagggactacagtctgtcagttgttctcagccaaggagctcacagttcagctgctgatatttataacccttatgtgtcaactctcttgggcccccccgcaaagaattccagttctctgtaataatcctctccactcctaccgtagcaactgggtggggagaaggtgaaggagcccgtaagacctttaagtttgctgtgttgaacttcttccagccccatttcaaagtatcggtattttaaacatcagcattgcaagcaaaattccaacctcgcagctgttacatcaccttaaaggagactcatgcctcaatgaaggtagtaaagccaagtggaaagttgtccaaaaagcattgatggatttcacaaaaacctgtgtggaaatttcgatagcaaggagagactttaaaggaaaaaatgaacatatcctcaaccagactgagccagtttgatttgagtctactgaaattcttcacatacagtgtcagcatgcaggattcacaactaagattgatcatcttgtgattttatacaagaaggaagaaaaatctgtttccagaaaaactggaatttgccatcttgatagtttgtatttatttttgtgtatttgataagtgaacatggttgagacaagctcagacaagatgagaaacatgactgtttctcactgtgtctagaaatgaatggtaagtggtctcagccttagcccactgctgggcactttccagctagacagctggcacaggagctataaacagtgagcctctaggaagtgtgatgagtcactgtgaagggcactttattgttaaaattggttgatttagcaggaataaaatgagttccacagggaggcgcatcaggtcactgcaccaaagcaccactacactagaggactgcctccctgctgaatggattcttcccaagtctcagctgtcccagttggaaaagcctggctctggggaaaatttgctccccaccttgcttaatacttttccaatacagagtgcttttcaaatataagtttctggtattggcggtggaagagtaatgggatacacttattccctaggccttcacaaactgttttcctactaccagtactgtgatttgaaatgtggatgtttagtgtgactttcagaactctagccacccagggactagaagaagtactatctggtgatgatccatggatcccttcatggggataaggaggaaagggttccatattcctttcaatccatccttactgagcactgggccagtccttgtggtaggtgctggatttttaggtagtctctatctagttaataatgtagcctgagaaacagacacgtagaattgccatgatagggaggcagtggtaggtgcttaagagagacctgagtctacatattctctaatcctaaaaaaaaaaatcctaacaacccccctgtaaatcagacatttaaaatcccagtttgcagataagaaaacttgagacttgaagagtttaaaataacttgttcaagccacatagctagtaaatgtttgagctgggaatggaaaggtctgtttggcaccaaagctcatgctataccagtggtctttcaaactgggcaattttgcctcctggggaatatttcgttcccagacatttttgattggcatgactgaggaggctgctactggcatttagtaagtagtggccaggggtgctgcttgacatcctacaatgcacggaacagtccctcacagcaaagagttattcagcctacttctagaaagataagaggtttgctttttgcacttttcagattccatgacgagtaagagttagctgatgaaatagtttcactgtctggggaactccatggtttcctccctttttttttttttcagaaaatagttgagaaacagtgtctcttccaagagtgacttatgcaggtcttggataaagtcaggatcttggcgaactaatttgaatcagtggctaaagaattctctccatgcttgaccagtccccaccccaccctgccacaagactcctgctgtggaaatcaatcagctgtgtatcacaagctgcttcctgtagggtgtgttatggaatggcatcagcccctgcaccagctgggagtactgatctcagtgtgatttttatcaggctctgtctcttttgagccttgttgtttggaacaaagaagtctctgttcgaaatgcagagagctagtgtgattggacagccagtgtgtacgcacatggttcccacggaaaaacagacataaattatgctgtggccttctaaaacttgggcctccaaggtggatttccacattcacccttccttctctgagtgctcatccttcccccaaatcaatgcaggagccatgtgatctgatgaatgaaatggtggcatccctcagacctggtctatttctgtacttatagtcttttcattctctagccctttatgctgcagctgggataatcttcctaaagcattgcattttcatatcacacccctgggggtggggggaggagaaggaaaacaaccttcctttgccttcctgataaaatggtattcaagatactacatacaggagctctgctgtctttccagtcttacttcctgtgtagacgtcctcctctacccacttacctagacgctccttatacattcctatctgatttctgcccataccagagggcatagctgaagtctcactttttcacaaagccttcctcgacctccccagttcactacttcccctggtcttctgaatcccatatctgtaactcatttttcccttatcatatagtgcctaatttggagttttctgattacattcatttatcccatctctcatctcagtgagttcatttttgtgtcacccagagtagaaagcatattggtgtacacgtagttggaagttagtatttgactgattagatgagtgcccttcatttctcataagccacgtgagctctgggatttaaaatgctgtctactttatgtaacttcaggtatatcattgtgtaccctgaaaaacttttaatcctagcctattttccccacttctctgtcttttctctgagctcccttcctcccccactagttagcagatgttaaggaaacataatctcttttccgttattaggccaaatgaagaaaaattaagaaataaatttgctacttcagatgcatttgaggaaagccggattttgaaatactttgttttgtagttgacaatcacttcagagtccttgttatttactcagttaattgacagttaagaagagtcttcatacttcgttcagcttgctgagtaaaaaaactgaatgcaagtttgagtcagaaacatccagctttgaatcttggctcttatcatctactagctgagtgaccctagggaattccttaacctctctaagttacttgagttacaaagtaatttaaccaattataaagtgtttaactaattaaacaatgattaaatcgtatctttggggatttttttgagaattagatgatagataaaagcactaggcatatattataaataataatatctttttaaaatgcttttccagacatgcaaactagactattttgaaaattttttaagaaatgttactccctttgtgctaggtacagtcattctctaaaagatttcatctaaggcacagtgccagatttgattcactctttttcttcttggaaaagtggaaattatatgggtaaagtaaaatcattttgatggcagcagtgaaacaagtggatggacaattgagcagcttcctgagcagcttttatggaaaacaattctaaggcttgtttctaacctaagagtagcaacgcataggcaggtttaggtcatgacttcttaacacagttttaaatatattttaagtatatgtgtatgtgtgtgtgtatatatatatctatgtatatatacatgtatgtatatacacacacatgtatgtgtatagtaaaacctgtgagagccagaccacggggggactgccttgtttttctgggtcttgcaagttttctacctttgacggggcaatcttaccacttttctattgcttgtttagtggaaaatatttgagttttccttctctgacaggtgcctgccttacacaggttctggcttttgcaggttttaccatatattgccattgagtcaattctgactcatagtgacactataggactgagtagaacttccacatagggttccctaggttgtaacctttgtggaagcagactgccacatcttgctcccacagagcgcctggtgggctggtgggtttgaactgccagccttccggttagcagctaagtgtttaaccactgtgccggcacacgtgtgtgtgtgtgtgtgtgttcattatttattcatttagtcattcctatcagaatcccatagccagcaagtttttctgagaccattttggccttggccttggttattttcattatcaaatcagtcaatgttattttcattatcattaaccagaattaaccagaagctatcaccagctcagtgacttccccagctacccagagttacccatcagagatcagctttaatgatctcaggagtccttgccctaattagctcttatcacaggccatgttgccatacaatggtgactaccaagtcagcatcttcaggagagacaacttttaatattaatcaatctttaatttaaaacactgaagcgtgatggggggaatcagtttagtttcagagtcaagcagcttaaaaacatacagttcatctctctgtcatgcatacataccagatcatgaagttttatagaaagattttagttcttggcagtttcagcaaatataagtttctaatatttgtttttgcgtatatatgtgtcaaaggaagaagataataagaattcaaagaaattgaacttaccttaggtcttttccagcttgaactcattgtgtccattcaagcagaccatttaatgtctctcttcatcttgcaatccactcccaaaggaagaactcggactttggtctaattctttaaccaggaaacataagtcacttgcttgtttgtttgtaatcagtgataagaattgctttagtaacaaaacgaaatccttttcagaaatcttttctctctgtattatttatcctacctccttttttcataatggagaggggacacctgcagcaagattacttggagggtcagcccaggggattggtttcatggaaatagccaaccaactttgtgaaggtcatgctaccctggaactggaacaactggtcagtcccagggggaagcccacctcatcactttctcaggaaagcttcccctgaacctccaggccaggttggaccccttgacccatgctgtcatgacactgtttgcttctctttcagagtacttactgcaattgaatcaaaatgaatgtctcctttactagaatgtaggcttctgaccatgtcttgctcatggtcagttcctggcatagtttagggcacatagtagattccaataaatattttttgaatgagtgaagagaatcaagggtacaaccttgtgaaattacttaccttaaaaggtcagaaagaggagcctcagaagacaaagaaggactggttagaaaggtagcattatgatagcacagtgtcatggaagccaaaagaacaaagtcttaaaaagagagaagcaatactttctcactgcttatcctgaaccccttgtaatctgatgcagcccccatccctctgctaaaacagttcttttggaagtattcactgacttcctaattgccaagtctgctggtcttatctaactcatgaacctcttcaacctttatggtagcatttaatggcatatcttctttcttaaaaccctcctgtctgcttacttccctgtcagtgcactctccccattctcttctctggctgcttttctaccttcattttttggtttgccttcctacctcctaaatgcatgtggttcctggagttctgtcatctgccctcttctgtctactcaacccctgggatatatgtccagccctcatgttctgtggggaacccttccaaatctatctgtagccccaaatttgaatctcttgcgtgagggacccttgtggacatctccccatggttagcctctgagtacttcatactcagtatgctccaagttgcaagtgtcatctacaaatacttcctccctgctgttgttttgtaatgctactatgccctcagtaacccaagagtaatactatagtattattttaaatttatttttcctcttcacttctaccttctatctggtcagttgcaaagtcctgatagcacgcctctgcaatttctttcacagcccccttccttagtttcactagttcaggcttttcttttctttctttttttttttttttaacctcttgcctaaactgtatagtcctcttcagctgattgctcgacctttaaccttccccatttaccatctgttatattttttttatatatacatataaacacaaatgtggtatcagaagacctgggctcaaatcttggaagtttaggtatttaataactgtgttactttagacgaataagtttaccatcctgcgcttcatttataaattaaggatttggatttttaaatgagtcgctatataatagatggcagttgaatgagcatctagtcacaaatttttaggagaccttctaagcaccacttttataaccctcttataagtagctcttataaccccttgataagtttaagaacaaattctgatataatgatgattttctgaataaagcataaatttcttgtcttggcattcaaaagccttggcaaactggccttgatgtacttaccatcttgtcttagtcatccagtgcagctataagagaaataccacaggtggatggctttgataagcgtttatttctcacagtccagtaggctagaagtccgaattcagggtgccagctccaggggaaggcgttcttccctctgtcaactctggaagaacgtccttgtcatcagtcttcccttggtctgggagcctctcagagcaggaacctcaggtccaaaagggcacgctctgctcccagtgctgctttcttggtggtataaggttccccctgtctctctgctcgcttctgtcttttatatctcaaagagattggtttaagacactacttaatcttgtatatctcatcaatataactgccactaatccatctcatttcatcatagtgataggatttacaacacatagggaaatcacataaaatggtggacagtcacacaatactggaactcatggcccagctaagttgacggatattttggggggacacagttcaatccatgacacatcctgagctctcattttccccttccccacatcttgcacctaagtcatgctgagctaaaatttgctcctttaggtttccatactttctagccctggcccttcacttagaagtgctcatcttcaccatctctgtatatgcaaatcctaagagtaaatgtgattccctgactccgcttgccttccttcctcccatccttcagtcacttcttttctaacttgcaacgctccatgctttggtcatcaccactgtcttggtgactatgagtgtctaaaagagggattaatacactgtcttttggaaagtacactagcaggaaagggctgacaggggtcatgggagttcctgcagagtatgtggaaagttttctcatgggtttgggaatacatgtgagctcaaatagcatcaaaatgccattttaaacaagcttcacatcgtgctgtattgctttatgagccactctgtagccctctttataataatgaaagcactaaaggatgatagtgactgatccccaacaggttctgactaatactgtggagtttccacttgccgctaaataatgcttgtaaagcctagagatcctaagatgaaaggcattttgtagatttaaaatgtgcaagatccaaccagtcctctctatcctcctgtactcagaattatttctccaagaggaagaacactcatcaaggatactgaagaagttctgtccccggatgaaaaggcaatatagaatctaacaaagtgtggctctggggtcttccagttgtcctaaatgagtagagaattctctgaactctgtaatcaactaactgaaaactaacgtggttgcaggggtggaggaagcatctgaagaggttctctggagttctctgtatttctcttccaaaaagtttacacccagcatgtgaaatgaacagatgcttttttttgttgttgttagagttatcagagtaacaagaggctgaaagctgtatcaggtatttatttcagttactgagatggctcttggcagagttccacataccagaactaaggccagactcatgaagagataaaaaaaaaaaaagatgtggagaaaagagaccttgtgcttcccctcttgatttttttccaaacacatactgattacgaaaaaggagagaggcactgagaaagcactctttggcttgattttgttgttgttgtttttttgggagagaaggcagagttggtctactttatgtaatctctaggctgtgtttgaacttcggtgggggagttctgtaattcctaacacctctatcggaatgtgactaaagctggtaagtaatttgaatctgaatttaacagttgctgaaacgttccatttatttatttatgtatagtttggagtattggtgagaataaagtcaataggtatggggagggattaattaagaaaagactgaattgattggcacttgacttggtgaggaaacaagaaaagaattcagaccatgaagtttatgattccacatcaagatcatactttataatagaataaccacccacccttagtccagagccagaattcctcagattcttccaaccagaagggccctggcacgctagccagtctgttatgatatctcaacactttaagtgagtttatttggccggggagattggctagtgaagttggtctcgacttctctgggcttttccaactgtactgaataattaaaggaaaactaaaacccagattccctgaagagttaaatagcagacctgtaaactggtcaagccttaggatcacagtgtgtcagagttagaagggatcttaaaactcatcctgaagaaactggtggaggatttttaaatctgttttcccaaatccctgccaagtgattgcttgaatttctacttaaacacctccagagtcaggaatgtgaccactttagggaacaccctattctttgaatacctctgagaaggctctttgttggaattgaaatctgccctggatcttcatgtgccagcttaagaagacacccagaacaagcttccttccttcctcccacatcccagcccttcagatatttcatgttgatcacattgcctggaaccttctctaggtcaagcatccttggttctttctactgtttgttcatcacaggatgggacttctagccccctcccttctctctccgtctttctcaatgccttgcattgtagtactaggagaacacaggattctggggcagctcctttaaaagttctagaattaaagagtattaaaactagaaaggctgtcaagacacaacctagtctgctttcctttcagtttacagatggggaaaaagtcttggatttgagtgggcagttcatcaacagcagcctcttctgaactgagaaacaaagtgtaaaacattttgcccagtgaaagttgcttaattatgatcacagggttcagccaacacctcatttttggggaagacctctctgactccctaagaaagcctaaggctcaggtcagggctccaccgctaggtctccttacatcacctattggcagcatttgttgtgtgtgtgaaggacagaaataacttttgcgtaggttttatcatctgtattgacatgatccaacagggattaaggaagtctaacaaactttctttttttccttcataaaatcagggaatggctttcaaaaaggggcagagtattgcttcccttcagaaatgcagctgctctggtggacagtttcctgggttgccctttgtactttgtttaccgtcaccaggtggctagatggcttttctaaaagccaaaaagctgtggatggggttgtaggccactttactatttagatgtttttaggacttgaactgcactgagcgcactgcttttcagctggccccccggctcgggtttccttggatgggcatagcaataaaggagtggggcgctgcttgggcgtggggcgctgctgccggcacctccgccgccaccacccccctttcctcagtcattgacactgctcaggtctgtgggtggagaaatcctggtgggagaatatacacgaggcgggagggaaaaggtagagtgtgcctagagtttatccaataacttggtctccaagcgtggtcgaattccttcggactccaggaaggtgccgtctttaaggcttgagtgttccttggccaggcggaggctctctagaggtgacattggagggactacggactagcctttggcggcggagctggagccgagggggatgcagacgcccctacccacttcacacacacacacacccccctcccccagccggcacgatcctgccggcagatggggcccggagtggcccttgccagagccggctggctggggggaggcgggggcgccccttctgggttcgctcgccctagggctgggctggatgcctagcgggttggggcgaggatcgggcggccgggggccgggccagcggcagggggcggggccctcctttgtcaggggatttgcgcggcgcggcggagactcgcgctagtgccgctcccctcctctcgccctcgcgggggcggtgctctgcactccggcccggaggcccggggggcgtgggcttcgttagcctagcggatggcgccctgggttcctcgatccaaaccctgcaaaagcccctccttcggggcctcggcttccaatcctctccgccggcccccgccctggtccctccggtcgctcctcttctctgcccccacccaggctccgcctccgcccgcctccccttggctctccgcgtcgcccgctcccaggcttccaggggggctgcccgggcggggcggggcggcgcggcggcgcggcgcggcgcggggaagggggaggagagccgcccgccagccgagcactcccagcgagcggcgggcgggccagcggacgggtgagcggcgggcgcgaagaaggagggctcgccccccgcccggcccgagcagagccttttgttcccagccagaagtttgcatgccgggaccgtgacagctgcgggtgggaggacgacggggacgcggggccggcggcgacggtggagaatagaggcggctgcttgacatgcagcccacggcgcggcgtctgcgggccggggggaggcggcgcccacagcgcacgggactcggctgccggagggacaaactaacttcctgagcgcggaacctgaggccggcgcggccgggagccacctgccaacctgcggtgaggcgaccctggccctctgggcgcgcggcatggcgcgggggagcgggccgcgttgagcgagcccctccgacagaccgtcggccgctactgcagtttgcccgccttctggaaggcccggcgcgagcttcactctctttcttttgcggccacagcgcagggctggcctgggagccacaacaatgccatgatgttttggagacaggaagccccaggctggccccgaatgaaggacttcctgtgtttaaagttgcaggaatatccgccgacgagcccagttcaaatgcaaacaccccaactagggaggacgaatggctaattcagaccagctggactctccagggctggaactgaggataaaatgaaaggaattcttaggagcttgggccatacgtgaagactagagaggctgtgccattgttactaacggacacaatcggtgtaaattcgctgcctccagttctgctacggtgagatgtgagtggaactagatattgaataagacttgtcgatatcagataattcttgctgactggataagaaagaacagggctcctttttaaaaaagccatacaaggaattatgtttgctgattaaatcatatcatttatctgcctgcaactatgaggctgctagcctatgtgggaaaagctggtcggcttaaagcttctcccagaatggttcgaaagtgggacttgcacgccttttctggagggcagatgcacttggtggtttggagtataagtatgtaaaaggatttttaacttacgcagaatgcattttgggggaacttgtgaaaaaacttttaaaagattggtggttcatcttgattgaaaaagtatgggtaagccactcagcaggccagactgtttaaggcagaaccccacctgcctggggaaaggagaggaagaggatggctatatagaggattgctatgttcctcagcggtctatatatgatacaatgaggataaatgaacaaattgaccaggggtcaaagcttaatcagacttcaaaaagcaccatggaaaagatggaaggaagtactatatccagcaatggtacgttaggagcagcatctaatgtatttgaatctcgagcaccagaaagcaaaaagctggatgagagaataatctttgatgcactgaagctaagcagcgatgtgcagaaatcagcacctgtgccacccagaaggcgaccaaatgcagaacgcaaagataatgttaacaggagatcttggaagtccttcatgccacccaacttcccagaatttgcagaaaggatggaggcttctctcagtgaggtttccgaagctggtgcttctaatccttccttgcaagagaaaagagaatctagttctgtattaacagaaagttctggtcatttggaccacagggaacctcaggcagagtcagtcactctggaacatgtgcccaaatccatcggaattccagaagtgccggatgtgaaaaacttaagtggagactgccagaacttcaggttacagcagcacagcgagagctctccccgtgaattccagcctctggaatcagagactgcagcagcaagtagtaacacagatgtaatgcaggaacacagattctcaagtgctacctggcccagggccatgaaaagtttggctaaggaaggcttcagcgagaagcagcacccccttggggacacagcctgcactatggaaatgccacctctctccccttgcctaagtgaagagctgttggatccagagttgcatattctcgtaacccccagcctgagagagaaaacagagtctgagctaaagtttgaggaggatgagcgatggatcatgatggaggctgaggaagagtgggaggaagagaaactgtcagacagaggaaagacttttctaataacagatgagaaaaagaacagcctagcagatatttttgaagaaagggaacaaacaaactctgtagctgtggtggaggataaagccaattgctcagctgctgtcttgacttttgaccacccttgtcagatttgctctgatgacccacagccagctaaggaccacttggcttctgttcccaaggattcaccctttgattacagttgcgtcctctcaggtgagggtgctgtatgtgagattgaaaacagagctgctcaggggctagagcgtcttgtttcagattcagaatgtattgttggtcctgtcgatgcagagcagctctctgatacagattcagtgcagatgtttcttgaacttgaaaaggagtgtttatgtgaagaagaagtcatgcctgtagttgagctggagaatcaagcctcttctgaagggctggccccattccaggatgcagaagattcacatgtaatgagttattttccaggggctgccttagaaaaggaacaacatgtaggttttttaaatgtaaaggtaaaggactgtgatactggattggattgtgaatattttaatgccctggatttttctcaggtgcctaatacaatagaacttattacccatcctgataccatgaggaacgcttccactattagcaaggaggagtgtgaaaaagtgccttttagccccaagactgtagaggaatttaagttcagatgctcagctgacctggagtcactaggagagctggacctagaaagattatcaaactctgatcacaggccttattttgaagaaaatttatcaagctctgttacttctgagctggccagcgaaaatggcagtttgtcccaggttgactgcagtcacattgaggggaatgttgaggagtgtgttgagagggtctcccttagttctgctttggactatgaactaacagatgttacctcaaagcctgaagtagaggtgttatcatatggttcacatttactaacagatgaaatgcatttggaaggtgaacaaggagctattaatcaaggaagtaatagcctgacttcctcaggacacatggacccttgtaaattgttgtccgtggagaaactttgtgatgaagatggtgaggcaaaagaattggattacaaaaccaagcttttgaaggatcaagccccagcacattttctcagagacttcccagagcaagtctccccgagtctccagaggaagtcctcagagtcagagattctgagtctgcaccctctggttggagcactgagacatagcagagacggaatggaaactgtgaatgatatcaagccccagccgaatgtggcatcatcagagggagatgagatggaaaagagaggctcagattcattgctaggtagctttcaggaggaacaagttaccaaggctgataatattgtaccagttttggagaaatggatacccagtccacagagacgtgccccaactactgcagcatctaccccagaggacgatgtcccatttgttgcagtgcctgccccagagggacctgctgcctcagctgctgcagtgtcttccccagggggggctgctgcagcttctgtggggtctgctccagaggaggatgtcccagctgctgcagtggtcaccacagaggaggatggcctagctgctacagtggtcaccagagaggaggatgtcccagctgctgcagtggtcaccagagaggaagatggcccagctgccgcagtgatcaacgtagaggaggatggcccagctgccgcagtggtcaccgtagaggaggatggcccaggtgctgcagtggtcaccagagaggaggatgtcccagcagctgcagtggtctccagagaggaggatggcccaggtgccacagtggtcaccagagaggaggatgtcccagctgccgcagtggtcaccagagaggaggatgtcccagctgccgcagtggtcaccagagaggaggatggcccagctgccgcagtagtcactacagaagaggatggcccagctgctgcagtggtcaccacagaggaggatgacccagctgctgcaccggtcaccacagaggaggacgtcccagctgccgcagtggtcaccatagaggaggatgtccaagctgctgcagtggtcaccatagaggaggatgtcccagctgctgcagtggtcaccatagaggaggatgtcccagctgccgcagtagtcaccagagaggaggatgtctcagctgctgcaatggtcaccatagaggaggatgtcctggctgctgcagtggtcaccatagaggaggatgtcacagctgctgcaatggtcaccagagaggaggatgtcccagctactgcagtggtcaccacagaggaagatgtcccagctgctgcagtggtcaccacagaggaggatgacccagccgctgcagtggtcaccatagaggaggatgtcccagccgctgcagtggtcaccatagaggaggatgacccagccgctgcagtggtcaccatagaggaggatgtcccagctgccgcagtggtcaccacagaggaggatgtcccagctgccgcagtggtcaccatagaggaggatgtcccagctgctgcagtggtcaccacagaggaggatggcccagctgctgcagtggtcaccacagaggaggatggcccagctactgcagtggtcaccatagaggaggatgtcccagctgccgcagtggtcaccagagaggaggatgtcccagctgccgcagtggacaccagagaggaggatgtcccaactgctgcagtggtcaccacagaggaggatggcccagctgctacagtggtcaccagagaggaggatgtcccagctgctgcagtgatcaccacagaggaggatggcccaggtgtcgcagtggtcatcacagaggaggatggcccagctgctacagtggtcatcacagaggaggatggcccagctgctacagtggtcaccacagaggaggatgacccagctgctgcagtggtcaccagagaggaggatgtcccagctgctgcagtggtcaccacagaggaggatggcccacctgccccagtagtcaccagagaggaggatgtcccagctaccgcagtggtcaccagagaggaggatggcccagctgccacagtggtcaccagagaggaggatggcccagctgccgcagtggtcatcagagaggaggatgtcccagctgccgcagtggtcatcagagaggaggatgtcccagctgccgcagtggtcaccatagaggaggatggcccaggtgccacagtggtcatcagagagaaggatgtcccagctgccgcagtggtcaccatagaggaggatgtcccagctgccgcagtggtcaccatagaggaggatggctcaggtgctgcagtggtcaccatagaggaggatggcccagctgctgcagtggtcaccatagaggaggatggctcaggtgccgcagtggtcaccatagaggaggatggcccagctgctgcagtggtcaccatagaggaggatggcccagctgccgcagtggtcaccatagaggaggatggcacagctgctgcagtggtcaccatagaggaggatggctcaggtgccgcagtggtcaccatagaggaggatggcccagctgctgcagtggtcaccatagaggaggatgactcagctgccgcagtggtcaccatagaggagggtggcccagctcctgcagtggtcaccatagaggaggatggctcaggtgccgcagtggtcaccatagaggaggatgactcagctgccgcagtggtcaccgtagaggagggtggcccagctcctgcagtggtcaccatagaggaggatggcccagctgctgcagtggtcaccatagaggaggatggcccaggtgctgcagtggtcaccatagaggaggatggcccagctgctacagtggtcaccgtagaggaggatggctcaggtgccgcagtggtcaccatagaggaggatgactcagctgccgcagtggtcaccgtagaggagggtggcccagctcctgcagtggtcaccatagaggaggatggcccagctgctgcagtggtcaccatagaggaggatggcacagctgctacagtggtcaccgtagaggaggatggctcaggtgccgcagtggtcaccgtagaggaggatgactcagctgccgcagtggtcaccgtagaggagggtggcccagctgccgcagtggtcaccgtagaggaggatggcccagctgccgcagtggtcaccgtagaggagggtggcccagctgccgcagtggtcaccgtagaggaggatggcccagctgccgcagtggtcaccgtagaggagggtggcccagctgccgcagtggtcaccgtagaggaggatggcccagctgccgcagtggtcaccgtagaggaggatggcccagctgccgcagtggtcaccgtagaggaggatggcccagctgccgcagtggtcaccgtagaggaggatggcccagctgccgcagtggtcaccgtagaggagggtggcccagctgccgcagtggtcaccgtagaggaggatggcccagctgccgcagtggtcaccgtagaggaggatggcccagctgccgcagtggtcaccatagaggaggatggcccaggtgctgcagtggtcaccatagaggaggaaggcccagctgctgcagtggtcaccgtagaggaggatggcccagctgccacagtggtcaccagagaggaggatggcacagttgctgcagtatcagccccagagggggctcctgcttcagctgttgcagtgcctactgtagagcggatggttccagttgctgcagtgacttccccaaagggcactattccagctgctgcagtggctgtcacagaagatgtttcagctgttgcagacccttctgcagagggtagtgctgcaacggctacagtgcccaccaaagaggaggatgacgcccctgagaggcctgtcaccccagctgctgcagtgcctactcccaagaggcctgccgccccagctgttggaatgcctgtcccagaggaggatgacaccccagctactgccttacctgcctcagaggacaccccagaagggcctgcagccccagatgttggagtgcccactccagaggggcatgctgccccagatgttggaacgctcactccagaggggccttttgccacagctgctgaagtacttgccccagaggaggatgacaccccagacaagcctgccgccccagctgctgcagtggctgccccagaggaggatgacaccccagatgatcctgacaccccagctgctgcagtggctgccccagaggaggatgacaccctagatgatcctgacaccccagctgctgcagtggctgccccagaggaggatgacaccccagatgatcctgacactccagatgatcctgacaccccagctgctgcagtggctgccccagaggaggatgacaccccagaggggcctgctgccccagatgttgcagtgcccactgcagaggagcctcctgccccagctgctgcagtgcctgctgtggaggaagttttccctgctggagtctcctctgtgggagatactgcccacactgattcagtgcctgtctcagaaggaagaattcctgttcaggtggaggcttcccctgctggaatgtgcatcaagaaggaccttgattccccagcatttggggtaaaagagatgactggcacagtgctacatgggcaagtgcttctgactgcaactgatggattaagttcaaatgaggtaattgttgttcgttttgttgtggggaggggtatggggattaaagtgagatttgcaagctctctgacttggtagtgatagaactagcacagacagtcctttctttagttctttttgggtcccctgggctgacattttctggtctttcagtttatggggagctggtggagattaaaatatatcttacattggtcgggtggaaaaaaactaagttgaactcagttttttattccagttagccaagcttaaggagaactagaatgtaaacagctgttgattttgaaaaagatgattagcaggtaagggtgatttctgcttttgaaatacacagcaagcctgttgtttcctaaattactgacccatggcgtctgcagccaggtataggccaggttgtgggctttggagttagacctggggtacttattaaccactctgggaaaattatttacaaattctgagtctctgtttccttctttgttaaggcagaaccctgggaggatagaatgagatagcacatttaaaacatcaaacatattaagatttgaatcactgacagttttcttcccctttcccttcaaatggatatgttggttagttgaaagaatttaccagaataggttgagtcaaagccatatgtagatacctgaataacagcaattaattcaaatgtgtatttttttaaagccactgaaaaataaagaagtattttaagtcatcttgtcaaactgccactgtccttaagcaagtcacctttctttcttggaccgcttgcttcctgatctataaaataaaggatttgggctaaatgtcctcctgggtctctttgagctccaaaattctaagattcttaatgttagagaacagaatgttaggaaacagataggaacagtgttccacctccctgaggaatttgagatttgcagctttctacagttaactgcccaggtgttgtttggtcagtagtaaggcatgaactagttagagctaacgctaagggtcctggataactgagttagtgaggatgttgttttgattttgcaccatccctaggacccaaaacagtgccttcttcagagtaggcattgactgttaactgactgaatgagtgaataacaatttcctgaatatccaggaatactgcaagaaagacaggtactctcatccgcccgattgtagggcctttcgaggtagccctagtcagctagagcaccaattaaacatacgcttcagcaactagaggcctggttgcatagtggtgaagagctcggcagcaaaccaaaaggccggcagttcagatccactagctgctccttggaaaccccagggggcagttctactctgtcctatagggtcactaggagtctgaatcgactcgatagcaacaaatttggttttgggcttttttttttttttttatttggatatcagcagctaaaaatcattttgaatgtggcccataaggtgccaactttgccacagatcctcaggcctagctgagttgtggtttctcttcggggattcccatttattttgtaatacagcataaaattagagtgcatcatccttcagctgagattgacgaatttgattcggttttctgagttttacagagtttggaattgatgccaagatccccataacctgtctaaagtcccaacagtaagtcaaatgacagtaaatttcttccacttgcattctcaattgcccagaatatttctggaataaagcctacatacagcagtaatcaatgaagttaaatttgtcaggagccaatcaattctacataaagggggaaaaaaatccagagaaaccgttaatatctatgtctgagatctctgttcctccatctacaaaataagtggatggggctagataatgtctaagtcattttatgaactgttaccaggtataagagagcagtggtggttcagtggtagacttctcaccgtccacgtgggagacctgggttcagctcccagccagtgcacctcatgcacagtcactgtctgtctctcactggaggcttgcatgttgctatgatgctaaacaagttacagtggagcttacagactaagacagactagggagaaaggcctggtgatcccaaaccaaacccactgcgtcgagtcaattccaacttatagcgaccctgtacaactgagtagagctgccccatagggcttccaaggccgtaaatctttatgggagcagattgctacatctttctcccgtggtgcggctggtgggtttgaaccatggacctttcggttagtagccaagcccttaacaactacgccaccagtggtgctcctccttggtgatccacttccccaaaaagccagctagtgaaaaccattgggatcacaaccgcctgatctcattgtgcatgggattgttatcagtcaggggctgacttgacaacagctaacagcacaagtgacaggaaaaggaaatagcccagctagaagattacccattgtctttgaagggtagttactttttggaatatctggaagcaaacagacacctacatctgtgtgcaaaggaaagtaaggtctaagccattgactcagccaggactattaaccagtaagaatatagactattttgagaatatttattgaaaaaatatcattatagagttaacatgagtacacagattttactaagttggtgaaatactgaaaaaaaattttctgagatgagagctgtattgtatggattccatttctaccattttaagagggttcttggaggcaactgaacctatcagttttatacgtaaacacacacttagaattcaacaaatgatcctactggaatgtatttagaataaactactttacattactttagatcttttgtgtgtgtgtacatacatccatacgcacatgtatatacaagatttaagtagttaaagactttctaatagacaataacagaagactgtgtgtggtagaagcagcggaatgccagaacggtttctatttcttgcataggatcctaggcccactgagagcaatttgtagttatttaaattccctactcatttttaaactttttcagtcttattcttagttactggctcaaaggagggaaaaaaaaaatgttttgtataaaattaaaatttgccaagtgagtctttttgagacaaaattgaggaaacccacaataccacttcagtgtttgaatgcttagctcatcagcagaaccttcatggattctgctccctggataaatatttatagagtccctactactctgtgccaggtactggggctcctgtactgaacagaactgacaggtcactgccttcatgggacttatgctgtagtgggggtaacagacattaatcaaaaaaatcacacaaatatatacagtaattataaatcatggcaaatgctttgaatgaaaagtaacagctatgacaagaaattataatagggtgatttaattcaaatcagggtgtcagggaaaggattttaaaactaaaagatgaatagaagttatttaggcaaagagtcaaagggaagagaattccagacaaaggaaatgaaagctgagaagagcttggcatgttagaactaaaagaaggccagggggctagaacacagtgagcaaaggggaagagtgccttgaagttaaagctagagaggtagagggggtcacatgttgcagggactgagtaagaagtttaaattttactttaaaagacgttggaagctactgaaagattttaagtagagaagtggaatgatttggtttacgttttttaaagattactcccagcttaaagatagagaaaaatggtccacactgacagtacacattcccaacattactgggtgtttataagtctcaggtttctttcgtattatattttattagcttgtattacaatagttgctatggaatacagaagacactgaatggtttgcaagtgaaaacacaatctccatggctactgtctatatttgtaggtgatcaaggacagagtggagagtcctgctaggttactgcaattgccgaggtggcctggactatggaagtgtcagtgggtttgaagatagttgtatattgcagataagatcactaagacctgatagtggcttatgtgttgggggtaagagagaggatacagtaagtcaaggatgatgtctaattcctgatttttataactcagtgggtcaggagtagtaaattgtcagtttagggaaggaacagattttgagggaggaaaagtgagagatactctttggttttggaactgttggttcaagattcctgtgattaatttgtatagagatattaggaaagcagttggatatgtagatttgaaagtcagacccaaaaaactcattgccgtcagatcaattcctactcatagcaaccctacaggacagaatagaactgccccgtagggttttctaggctgaaatcttcatggaggccaactgaaatctgtacagaatcttttctcctgcggggcagctgatgggtttgaaccaccaaccttttgattggcaaccaggtgctttaaccactgtgcctccagagtcccttttgaaactcagaagagaggtatgaatttgagtcatagcatttatcatggttaatatttaaagccatgggaatgaatggaattgcctaggaagagagtatagcatgaaaagagggcccaggactgatatctgccctctagccctccagagacatttgaaggtctagaagataagcggaagagatcagagaacactgaaaaatgtcaggataaaaactagcagagctgtagtatcaccaaagataattaacatgttttaagaagttctttgggaaattttctgttttatgtccctgttgcatcttacagccttagaatagtttttactagtgtactgatgtggaaaatacctgccagtgctggttagttaataacaggtgacagtgccgtttcactacagggtgtgaaatactaaggagtaggaatttcagtgtatctgaaagcacgcattttacaaaacagctttatttggaacttgggagaaggaagtaagtgtgttcaaatttactttaacattgtgttcagttgcgttcaaaatgtctagatagtatttagaggtaattttgtatatttgtaaaacttacaaaaaatgatgagacagatacccattgtccctgtcagctaatccatgaagaggaggtgggacacaaaggaagaaatccctactgcttctacaggaaatgttcatcaacaaaggaatctaaaatgttttcaagaatcggctctcttatatgaaagattattaagctatttaagtatgcttttacttttctgtatcatttatagcactgtccgtagaacttcctgccaagatggagatgtcctgtacctgtgctatccagaacagtagcactagcccatgaaatgtgatcagtgtgactgaggaactgcatttttaattttaaaaaattttaatttaaatttaaatagccatatgtacttagtggctaatgtattggacagcacagaaagagatttaaatatcagttgtagtgcaacaaggcttccattattggacaaaagagggcccttcacggtgtggacttgacattttccctctgcactttcggttttctgccttttttgcctttccaaccccccactcttcattttattgaaccaaagcaacttaaaacatgtttgttttttccctttgcttggatgtttctgcagtgaaaacatctttaatgtttgaaaatggaattatagcactggcttcttctgggaaccatttgttgggaaaacagtcatttttaactgaactgccttgtgttgcctaacaaaatatgatataaccaaattacagtgtgaaatgaagtgcactttttcagtgctccctggggctttcccttctggtgactcacttatccagccatagccaattctttcgagaagcagtttcctaatcctagtatgatctgtggtctcatataagaaaaaaacaaaccagttgccatcaagctgattccaactcatggtgacctgtgtgtgtcagagtagaactgtgctccatcgtgtttttaatggctggtttttcataagtagatcgctaggcctttcttctgtgccaccgctgcctggacttgaacctctaacctttcagtgtggtctcatataggtcttacctaaatttatcattttcttttacatttattttcatccttttctattttctgtcatcctgtggtcttaattgactcatctatctcattaaaactgaagaaacattttatggaaggaaaaagtggaaacagatgcaggttagtacaatgtggttgatttatcctctgataactgagagaaatctgatcctagggacatatttatttcattcttttccttaatatctttcatgtggcagaggtaccaccctcctaaccctttttgtttccttttagaaatttctaagtcataatggaatttaaatatagctaccgtttttttaccgtaagtatgcagattgtttgttacatttattcaccttgttttaagatgccattgtttcatagtgtacatggatatacagcatcattttttttaaaaatattatgtatgtgtatcttagagtatgtatctgaaattgataaggaaatttcttaatcttactgactgatttccttttgtaaccagaggaatacatttcaagattattgggcttgtctggtctgtggcctcagaactgaacgaagttaaatggccacaggggaattaagctatgaggttggcatttttcatgctgttaatatgttccaattaactgagttattagtccttatcaaagaagagtagtgcgtatttcagtgatcatttaaggctattccccagggtatttttaatcttaaatactagtcatttggtgtaattcttccctcttaatattgatatacatcacacttatttttatgatattttgaggatggcgcttctttcttgcctttagctttttgcattaagaattaggcaaacagattttaaaacactcacaaacacagtagtcactgggttaaagacctaagttgtgccataactctctgtaattacatgtccataggaggtttactgaaatatgaaaccacatgttatccttaatgctaccctgtgcaaataactggtttcctcctttttagtctttgcccttctctgaatcatggatctcccaagaatagcaagtcactgtgtggtgtagagagtctgatagcattttgattaagtctttgatttactattctccagacatttcagaaagaacaagtggatcccctgcagatgaaattgcagcaggtgaatggacttggccagggattgattcagagtgcggggaaaaactgtgatgtgcagggtttggaacatgacatggaagaaatcaatgctcgctggaatacattgaataaaaaggtgagtggtgagggtacaacgaggtactaggaacagaggaatagaaaaggaggcggcatttaaatctaagatttaactgaacctgaatgcagataaaaattagcgtttgtaatctgtatttgctaaaaggggtcagtagtaatttaaaaactgctgtctcctttttcatgatgaatctatgtatctgtgatacaggttgcacaaagaattgcacaactgcaggaggctttgttgcattgtgggaagttccaagatgccttggagccattgctcagctggttggcagacacagaggagctaatagccaatcagaaacctccatctgctgagtataaagtggtgaaagcacagatccaagaacagaaggtgagtgagaatgttgggacagtgaactgtaacagccgcagggaatggcagacaacacattcgcttctagtctcaggagaacagtcaggagttttagtagaatcctaacctgttttctgtgatcctgacaaagaaaggtggaaacttattttcatcatccttctttaatcttataacatggaagcagcagtcaataagtcaaacagtgtagtgcattgagcaaatctgcagcaaaagatttctttaaagtgttaaaaagctaagataccactttgaggactaaggtgccctgacccaaagcatggtgttttcaattgcctcatatgcatgtgatgcaatgaaaaaggaagactaaaaaagaattgatgtacttgaattatggtgttggcaaagaatattgattataccgtggactgcccaaagaacaaacaaatatgtcttggaagaagcacagccagaatgctcctttgaagcaaagatggcgagacttcgcctcacatactttagacatgttatcaggagggactggaccaggaagaacatcatgtttggtaaagtagagggtcaatgaaaaacaggaagaccctcaacgagatggattgacacagtgactgcaacaatgggctcaaacagcaatgactgtgaggatgccacaggaccgggcagtgttttgttttgttgtacacagggtcgctgtgagtcagaaccaactcgacagcatctaacagcagcaactgtacgagtttacttggcacatgttggactgaacagttttatttgttcctgtaccctattttgatgtttcatccatagctttatgttaagaggtttttggtttattagggttagcaatattctaaataatgttgtgtatcatgtacaagtttctgtgttttttgtttaatttccgtttcagtgcatttttctcttattcaagggaagtcactgctgcatttaaaaacttaaattgtttgaaaagtttacgcgaatggtaggaactatgctctacctcatgttttttgcgtcaaggatgaaaaaaaatccttattcaagtcaacttagaatttagtgggttttttttttttttcctccttacttcgaactgaaaaatgacctatttaatgcctcttttattctccttaaatgtgtatacaatagttgctccagcgactcctagatgatcgaaaggccacggtagacatgcttcaagcagaaggaggcagaatagcccagtcagccgagctggctgatagagagaaaatcactggacagctgaagagtcttgaaagtagatggactgaactactcagcaaggcagcggccaggtaaggccaaaggggttttgaggaacaggtcagagatggtttgttttatcttatttttgacctgctattttatcattgagatgctctaagagctcctggaatgatccatacagtgcttcagagggtgtttaatgactttcatcttcaagaggggtaggtgttgagagatgagccagaatcactgtcaggaaatgagcttgagctagtcagtaaacttctgagaactggaagagattcagcactgtgttactgttctgctgcagtataatcacagttccatacgacagatgtatactcttacaatccagccaagttattttcagagtttttgaaacagatttttttttcacttcagatttataaatagtgccttcgatacttggaattgacatttatcatatttcttttctattagtttgtcctaatatttgcattagatgtttttgcatctaggcactagtctgtggttgtgtttaatatatgggcattgaagagattcatgaacttttcttcaataagtggcccagggacaggcagtaccccttcttccttcagagaagtttcttttctttccataactctgactgtaatgtcacttgaacttaacaggtcatgtggatatctttatttgtagcttatactgtccccacttttaaaaataaatgccagctcaccagaattgtgaggttggcatgggaccaggcagtgtttcattctgttgtacgtagcattgctatgagttgaaaccgactcagcggcacctaacaacaacacaacaatcagaaatcagtatgggagtattagaattgatcatttactattgtatcctttaagttttctaggtagccaacaacaattttcaaataattccctcttcagacacttccacctgcctaagattgcttatttcttatctgagttgcaattaattaatagacatttattaagatatggcttgcccatattagtgggaaatacaaaaatgaaagaatttaacttatttttatttccaaatccacgctgctttttttttctctccctgtttatttctgttaatggtaccactagccttccacgtaacctaggcctaaaacctcacctccatttttttttttttttttccttcttttctccccacatctattcggatgctaaattctgcccactttacttctacagtgtctttcctatgcatccatttctctaattcccactctcctacttcagttcatgacttaggagctctcccttggtctattgaggcagcctcctaactaatcactctgctgccacacctttcccacttcccctcagaccttcccctcttctcatccccagccttcccatcctgctataggcagacctttttgaagtatacctctggtcatatctttccaagctcaaaaacattgaaatggctccctgttgcctataaagtaaaatcttaactctttaatccaactgatattcaaagctctctactatttgatcccaacttatttttcttagttcccactattcttttctgtactttataggcaaagttaagtatattctattcttcaaaatcttctgtcagttccctaactctgtatctttgttgatggtgttgcatcttccttgaaatgcctttctcccatcaccccgtctccatctcccctttttctaggaagcttttctttattccccagcataaaataacttcttcccttaattgccatgtctctttatctgtactgtgtattatgaccattactctttgttcttacctctgtggttcataagcccattaaagtcatgatttttttttttttaactctttctttccaccctacccacttccatcttaccaacctaacagtttatgggccaatataccaagggcagtttcatttgttatagactttgtaaagatttttatttggattctttaatgttgaattttttatggttctaaattattttaactcttctttttgctaccccaaatcctattacatttatctcttcaaactttcagattccaagatcagagatgaggcagaaagatttggaaatcagaggcagttttcaaaaaaatgagattcagtttgattataacctttccgattatgtgttttagagttacattaattgaggatctgttttgaagattggcataaacaaactaggaaattctgtacttatattgacaattaaaattggtaacgtctagaaataggttttttttctattaaagcataattaaatttttttattaaaatcatttcttattaaaataaagttgccagtggtaatcaccatagggtgggccttacccaaagtaggtgttcagaaaaggtttgttgaactcaagtgcatcatatactccccggccttttcaaatgacatcatttagttgcttatactcaccattatggcctttcattattaatctgtgtgctgatatgattctatggtggtgttttagtttttctgtctcttttcaggctgcctgcaacatccaggcttcttctcttctttgtaattctctgcttttaatctacagaacacttgaaatccaagtttagtatggatgttaaataagagttaagatcccaaataaaggccatcgttcttttgactggcatttgtgttggcaaattcagccattctgaggtcattttttgccttaaattttgattcaaacttctgttctggaggttgaaattactagaagcctgatttcaaatactctcctcttcactcacaagtgaaggtagcagtgacagagagaaaaagaaatgaaaaactttatttcagtcatgtgttcagatgatgcatgcattatattccattttgatatgtttatcagtgtggtgtaaggaggaagagcactaagcttagaagatacaattctaatcctcattctcccattgctactccctgggcgacttgagcaaatcgttttttaagacttcagggtcttttctcttttgtaatagtggagataattactctgtcacttatgaggttatgagaggctcaaaaacgtaatgtacctaatgtgtattctgttgactgttgatatttaaactctacctggtaaagactggtcttttattgaatatggtactgtattataagtcttagtatgactttttgtctgagcatcttgttctatatatttgtgtaggcaaaaacagctggaagatatcctggttctagccaaacaattccatgagacagctgagcctatttctgacttcttatctgtcacagagaaaaaacttgctaactcagaacctgttggcactcagactgccaaaattcaacagcagattgttcggcacaaggtaggaatgtagttatgatacgtgaaaacacggaactggaccaagaaaccctagaaataagaaaactgcctgcagcattctagatgtatttgtgaagtttttaaaagtttaaaatatggtcagttattaattgcaaaagttacgttcttaaaataaaaatagaagttgactgataggcttcccttaggaaaaaaaagtcatgtttgcaatttttatattatttttgtcctgcggtatgtaaatttttatgttattgtttaatttgttatttcatttgttattcattgtttcatgttgacttttcatttcttttgtttctgttattcattttttccactccggatttccaggctctgaaggaagaaatagaaagccatgcaacagatgtgcaccaggcagtcaaaattgggcagtccctctcctccctgacatgttctgcagaacagggtgtgctttcagaaaagctagactcactgcaggcccggtacagtgagattcaagaccggtgctgccggaaagcagcactgcttgaacaagcactgtctaatgctagactgtttggggaggatgaggtggaggtgctcaactggctggctgaggttgaggacaagctcagttcagtgttcgtaaaggattacagacaggatgtcctacagaagcagcatgctgaccacctggtattcctgttttccattcttactggttatgttactagttattttgtagttttgattcatgtttctctttatttttttcattccaaacacattcactttatttcatacacaagtgtgtagagacttggtgttgcccattttgataagtctttgaaaatactcgtattcaacaaactcaatcagtaatcctagaagatggtacagagcagagttagggggcatctccattccaactcatgctttacatcattgatggtatctgtaagtttccacttaagcagttttatgaaagagaacgtactttaacaaaaccaggtatactcaagtactgcccggaatttgatcatattgccataacttttggaatatttctggaatttatatgctcgaattccaggaattctctgtcatcttggtagaaagaatagtttgccttttccatttcattttaatgaaatctctctttggggttataaaaataaacaaagcacttttttacaacagcctaagattctttgcttcattgacttcaaatattaagagagttttcatctaggatcctgatttaagtcaaccggttcttgctgactttattctcttggacttcctgtcttattctttattttgaggcataacaatgtttttgccgaattccacttctgcctttcaagggttcaggtttggtaccagtaaactggtaaagctgattaatcttaaatttgttcttatccagtagaaaggaaagcatgcctttaagtgtctgatttaattattttggttaattaatgaaggtaaccaaagagataatgaggaaatcaaatgtctcatgttttaaaaaaaaaaaaaaaactagactagcattcatctaaaaagatcatctctttaaatttggtctcttaaagaccttaaatttctttcactttgttttgccatagtttggggattaatgctattctttcctttcagactttaaatgaagagattgttaatagaaagaagaatgtagatcaagctattaaaaatggtcaggctcttctgaaacaaaccacaggtacttttgaacagtgcatctcaacacctctgtagtctcagagacagtcacatatccagggaagtataagtaccgcgcattagccgcttcttgttgatacatgagaagcttcatactcactggttgtattaccacgtgctccagggaggctggtgaacctgtgttcctatttcctgctacgcctttgaaaaccaaaagattttgttggtctcccatttggtgatagatgatgcctccctcttatctggtccccccaattaattgatcacatcaaatgccagcattcactgagaaatccagggaacatattggaaacacccggagatcttaataatcttagaagtggcttcttttatcaagtggaaggtttctctatctccagtgagggatgttaagtgataccactgccacagggtgggagcatctgtaaaggtctgatttgaagaaaaggggattaaaaggactccttcattcccagatctcttaaatatgaataatcatgtactgtctctcacaggcgaagaggtgttgcttattcaggagaaactagatggtataaaaactcgctatgcagacatcacagtcactagctccaaggccctcagaactttggagcaagcccggcagctggccaccaagttccagtctacttacgaggagctgactgggtggctgagggaggtggaggaggagctggcaaccagtgggggacagtctcccacaggggagcagataccccagtttcagcaaaggcagaaggtgagctgtcatctctcactgtgaagggaaaacaatcctcttagaatccttaacttcacatccttaggtttcatcaccaaatatctctaccttaaatctgaaccaataatttctgactgcctcctttcttacgtacggacactaaattttggcatagaaaaagacgtaaacgaggatactcgttatggcctaaaggaagaatattgaatgccaaatttctagtacaaacattttacaatttaccttcatgactcattgtctagagagcactttctggttatatttgattctcaggcaggatctagtacagttctagacacacagaagtactgtgtaggtgcttgttaagttaaacgcctatgtttaaagcattatttatttttttaatatatttctgttgaaataagggggggaaaaggagcactatttgttttacccagagacagtctggctcaagaagtcttctagacagttctaaataagcagcagctaagcctaaagtcaggctccagaatgattgaaaaattggagacaagaaaaaataactgaaggaaagaggtcaaagccctgctgggatgtgcggtagagatggcactccacccgcacagctgctggtgtactttatttagcaaggtgtggcctgaaaactcttttccctccttaggaattaaagaaggaggtcatggagcacaggctggtgttggacacagtgaatgaggtgagccgtgctctcctagagctggtgccctggagagccagagaagggctggataaacttgtatctgatgccaacgagcagtacaagctggtcagtgacactgttggacaaagggtggatgaaattgatgctgctattcagagatcacaacaggtaactttcatagcacttctgcgttgataccgtaaaacccgttgccctcaagtcaattccgactcatagtgaccctataggacagaatagaactgcccccatgaggtttccaggaagcagctgagggattcgaactgccgaccttttggttagcaaccaaagcttaaccactgcaccagggctcctactgatatgttaggccccgtatatataggcttaagaataagaatgatgaaatccagttatatctggtacaacaaacctgttttggtgatggtaagtgatttgtgaggatccaggtttgatccagcagtttcaaagtgcttgatcacttaggttagagaagaatttggagaagagaaggcctctatgtgaggccttgtcttagctgttcccctgctaagcaggtggattgcaattagcgtaaataatatctagacccaaaagttccaaatgcatcacaatgttagtttgacgtaatcaactgccttaacattagatagaagagggaaaggaaccaagagctataattactatcaaatatgctaaccaaaatagcagagccgtccaaaatagaacgctctcagtaaacacaggtgtcatatttcccttgatctttttgcttcctgctttctggagttatttgcttttctttgtagttgaatacacctattaatgttctacagcagaattaatatggcatgactccttgggttcatagtgataagcagatgccttctgaaccacacagacactagctctgattccaagtatatccccaaatgtgtcatcattgagatccctcatcttggccagatatttcaatgtgaaatttatcgtgcttgggagaagctcactttttctccttaagtatttgtgtaggttggcaaaattgaagaggaacagataaaaattggggaacactcatgaaaaaacagttgtgtagaacatgttcttaggttttctttgttaactgcataaaggtctagctaccataactgtttaaaggtttggggtcttcttttgtggtcttatgcttcttcagctgaacaagcatttcttagttaacttgactcagctgtttgctgccgtgttaagtaaatttatatttaaacatataaactagatctaccactgttcattgtctgggtaggaaagagaattggcaggaagattgtagccttataaaaacactctgattagtagtatatttcttttgaaaggtgtcagtttctgctgttgtttctaactgtaggaccaccgattaggttctgtaacttctttctaaaaaagttgaaatttgattatctcatttgtctgcatcttgatttgtggttttatgaagttctgcctggttttggcttaattttgtgagctgtaaactgtattactgaaaattcaggtttttctgtatttaataaattacagctgtaacaagtaggaccttggctatatgtaacgtgttctcccccccgcccccaacacttgtgttagtatgagcaagctgctgatgcagaactagcttgggttgctgaaacaaaacgaaaactgatggcccttggtccagttcgcttggagcaggaccagaccacagctcagctgcaagtacagaaggtaagtgtaacaccagtgtggccactctgtcctgagctggtcaaataatcagggcttagtgtgcctaggggagggagtttctcactatgctaagtcaagtgaaatgagtcagtgtcatcatgatggatagaaattaattttatgaatacttggggtgaggaagagattttttgcttgtgagaggggagaagtaggcccattaattcaaagtagttagcaatttaataaaaagcagttagcggttttgtggacaatgtttaggagaggaggtatttttgtaagctacaagaagacaggctttgaagatgtgtggatcggcaaagtgtcagactttttaagaacagatgtggctttaaagcaaggggtttatcatagactgtgtaacttttcactagcacaggcttaggcagaagaaaattagcatctttttacttcttgacttaactgtagtttacttttcaaggctttctccattgacatcattcgacacaaagattcaatggatgaactcttcagtcatcgtggtgaaatctttggcacatgtggggaggaacagaaagctctgttacaggtgaattacatttatttattcaccacacttgtgttcttgtcttgcctacagtgaattagatgcacagttgtgaaataatgatttaagagagactttttctcctaggctttattaccaatgagggtgttaaagcccaccttgatgttctagatctcagattcctatccctgtgttcacaaatgtctgaacagccgtattacataatgtcacaggaattgctacttacccttatgccatgaggcctgagctctgtgtcatttttaaggtatttgtgataggttttgcagaaccatatgcagactttaattccttcctcaggtccttctaaaagacatacccatttctaaaatgattgcccaagagagatagtttgtagaccagttttgtttgtttttcatagagagtgtgattaaccaccgttttcctagaaatctttgtatccaactaagctactcatctcaaacatgaagcataaatgccaggtttgtggagacttgtttgtcagaagaaaaaagaggtgatacttgatgggcagagactccatcacagcccgtaaggtgtccaatctaaactgatttgttttaataatcctgtgtctaaacgcgtgcatcgtcactgaaaggttaatgttgctgtgttggtcttgtgtcgttttcctgcctttaaaaatattttcatatcttagcaattatcaaaatgatacatatgtatgattggaagtgttttaaaaatcaggtaagtataaaaaattaaaatcatctgtaatcttaaccagattaatccatatttttttaacatttcagtgtgtatttcttcagacttttgaacatatatatacctacacttttttttaaagaagagttcacagtagtaataattctttgttttggcttataggaaaagacagagtctctaatacagcagtatgaagccataagcctactcaattcagagcgttacgcccgcctagagcgggcacaggttttggtgaaccagttttgggaaacgtacgaggagctcaacccctggattgaggaaacgcgggcactgacagcacagttacctcctccagctattgatcatgagcagctgaggcagcagcaagaggaaatgagggtaaggagcatgccgagttctactttgttgcaggtctgaaaatgagttccacaactcactcaacaatatttattagtgcccgctgggtgtaagttccatgttatgaagttaatttttaactggttagaatttctttgtgtaataaaaatatctatctgaattattgtctttgtcctttaacgtgaatcaattaaaggataagattatggagatgtcaggaacctggataatgagcagacgtaaaggcagaactaaataaaaaccaaggacatttaaagtctttctggggacaggggctgttgttagactgggctgggcttgagtggctctttgcacttggtgaggcaccagctggagtgagagccatggaggggtgtgaggaagcctttgctacatatctttgagatgaaaggggtaattatgtattatttcagctaatgctgttaccattaagggcacttcttaaatgtttattttatttctggtttaatggcttgtgcttagtgctgtccccatattcccatgagtaggagatacaaactggaagtagccaggagtagggtcaaggagcatttgggttaccggaaatgttgctattcatagcgtatcctgcttggctctcattctgatgatggagacagaaagttcaaccatataaattacattgtactacgtagaggtatttacaagtacagaggaggatggataaactggtacaggggtggagggagagtgagagatgatgtgccaggaaggtttcctgggtgatgggtcatccaaactgacttgaaaattaggagaatcaggtaatgtcagatcccaagacttaggtgttttttgtaccctataaatggtgagatggtgggacttgctagtttttcacacttcagtctgctcttctcaaagttggtataagctctgatcaaagtatctggacaaataaactggtataaaaatgcccctatgttttgatccatatttctttacatagcaactaagggaatccattgctgaacacaaacctcatattgacaagctactgaagataggtccacaactgaaggagctaaaccctgaggagggggaaatggtggaagaaaaataccagaaagcagaaaacatgtacgcccaaataaaagaggaagtgcgccagcgggccctggctttggatgaggctgtttcccagtctgctcaggtacgtgtgttatcttaaactcatatgaccttcagctgtcctttagcctaagcaagaggtcatctgtgtatcaggtatgcttctgtgttcagaagggtcctgaccagtgtgctgataatacattatcgatagactaggaaatattacctatctgtgttttttatcccaaggaacattggtatactgacactgtaaggagggtaaaatgcatcttggctgaaaactatctcttttagcaggattggctttgaataaactcatcttacgaactcagaaacaatgaatgtctctggaaggtcaagttcctgttgggcctggtactgttgagagttagaatgacagtacattagtcttcttactcaagaggccaccagctagctcctagttcagagagacgtgcttgagtggggagaaataagagctggaaagaaacataagccaccagcagttcagtttaaagcatgtaactacatacttttcaactaatatattactgttagtggtacttttgtcatgtctgggtattttttttcctatgtttagtcaatattcttggttaatacttgtacttactcaagtttttccccccaccttccatcccatctctcactcatattgtggaatgtgttactttgtgttgttgctgcctgctcctgtcttccccacatcgtcacatttcattgttgtgttgaccgcgcccaccattacagattacagaggtaaggtaccactcccgttgggattagggtgttctaataaagcagagattgaggtcattacctataaggaaatttcccttaaccctagtggaataaatattaattagtacagtttattatgccagtttcatttggggtggaacccagaaatgagggagtgatggggaagcgattttgttaaggaaatctcaccgtgttttcctatcggataattaaaattaataatccttactctaattcatgaatccagagttgttctttccagagttagtttcagatagctgttttagaagacaaacttacttgttttgctcccttttgcccccccttctccacttcaggttataaatgagaatttttcaattgtagtcatgtttttgaaagtaccagaaaaatgggaagctagttgttaatttaaaacaagttagatttgaccttctgtaattacctttcatcatgccaacattttccgttttcactgttagataacgtgggttgttaaattgcgtgccatgatacttttaaacccttagtcccaagcatattgagttccctgtccatttacacagctggtagagggcatctaacttgttggtctagtctgtcgcatgcaactgtcatctaaaatgttgacacactgactctcactagtttcatagtcttgtccctttctcgtcacattagttggaataggagaaatactgtggcagcactaaggatctgagtttatttctggtatattatttaatatctttttggttggtaaacatttgcattatatttctgatgagctagctctgatgtactatgcccaagcagtttcttagcaaaacccaacacccagcagcctttggggttcttgttgaacgtagcacaggttatcttaaacagtagtaggtttataccttggtcttattccctaacatttcccccagaagtgtgataaaattgttgtgatggctaaatggtccaacatttgtttagttccatgataaaattgagcccatgttggagacgctggagaatctttcctctcgcctgcgcatgccaccattgatccctgctgaagtagacaagatcagagagtgcatcagtgacaataaaagtgccaccgtggagctggaaaaactacagcctgcctttgaggccctgaaacgccgtggagaagagctcattgggcgatctcagggagctgacaaggatctggctgcaaaaggtgcttgatgaacctatttctttttaaagcaaaacagtgaaataaattctaggccgtggttatctccagcatcccgctgaatgtatttcatggaatgtagaggtagtccctaagtaatgagtattactgaaagtcttcgggaagtcatttagtattcagaacagatttctccattgaaacaaagttacaattggtagttagattcccagaccaggcaacaaatgctcctttaaccccctagtgtgagtaaagtacagtatcaatagtgggtagaatgtaactcaccttttataatactttccatgggaaacacacagcaagtgcaacacagaacactggaaacaaagttctcattccagcacctttgtaaattaggagttttgtattttagcagtctctttatcttagatgataacatttccagagtatctgtataatttctttatgtggaagaccagcataaaagaaaattgctaaggcagaaatattaatacaatatacaatataataatacaatattaataaggctaagttagaaaactatgagtttttagggcttttctttaggataatttcagtgaaaatgtcaacattaatgggaatttctgatgatgctgatttcaggtacttagagaagccctattcatatctcttctttacaaccccagaaatccaggataaattggatcaaatggtgttcttctgggaagatatcaaagctcgggctgaagagcgagaaattaaattccttgatgtccttgaattagcggagaagttctggtatgacatggcagctctcctgaccacaatcaaagacacccaggatatcgtccatgacttggaaagcccaggcattgacccatccatcatcaaacaacaggttgaagctgccgaggtaaaaaaaaaaaaaaaacagaaccccttctgttatgtgtttgtcctctagaaaagtactttatccaagtatgttgtgttgactgcttagccagcctgagcctcttaaaaggtttgttttgttttttgaagtttaataggatttttttccacttctcaaaaaaatacctgctcattataaaaagattttttttttttttttaactgtagaaaaatagaaggtagaaaagaaaaatcagttctgcactcaccatccagcgattacaattgacaaacatttttctgttccttttggggagctgtgttgttaggtaccatctagttggctccggctcatagtgaccttacgtataacagaacacatgttgctggtcctgcaccatccccacaatcatgcctagtttttactaaatgcttctctcaccttatccatttagcataagctaagcttgtcttgatattatctgtcttatgtcttacctttatttcagccattctcttacacagaaattctcctcctccttcccatccgttattgccagtccataaaccactttttaagacctggtacagaactgtctttcttcaagattaatagcctctttaactcctattatgatagtctctcaacccttaagtttgtgacttgcattattttaatatccttgttgatatattccgttgtagattgtaatcttcttgaagagagggactgtctcttgcctcttttcagaggatttgcataggactgtctccttgataggtgcttagcaaaataaagggatgcactcactatttgaagctcattgcatctttcacagtgagaaaaataaccatgcagtgtctgaagcctcacagtctagataggcagtatattaagatcattgacgaggttttgtgaaattgacagttctgctcaacagctactattgacagggtgtgaactacatttacaaagtttggaaagttctgctttctgtttcggcttatgttctgttcatttacatatagactattaaggaggagacagatggtctgcatgaggagctagagtttattcgaatccttggggcagatttgatttttgcctgtggagaaactgagaagcccgaggtgaagaagagcatcgatgaggtatggagacatgcataaagaattcagacgaagtgctagtagactcaaactgaagaggaacattaatttaagaatctgattgagtgttttccctctagatgaataatgcctgggagaacttaaacaaaacatggaaagagaggctggagaaacttgaggatgccatgcaagctgctgtgcagtatcaggacactctgcaggtgagaggccaggaggtgatcaccacggaaatacaggctccatcttccctgtgtcccttcctgaattcagtacaccagtggatcacctttacaggactgcggtgttctcaaaccaaagacggtgctctttccccatttctagccaaagcttctcacttctgttgagaaaagcactgacatatatccgaatttttacccttcctgtcagttttatcattattgagtgcttatcgtgtttgtcttcatggtggctatacaatgaagctagccttgctatgaaaatccttacttgctagaggttccaaacccaggttatcttaaagcacagcttggcacattagcttcaggatgttatcagcttcctagctagcaatgagaaatattaacttttattcagatttagtatttccaggtagtggtttattttggacattatcccaataatcttggctcagttcttaaatctccatgttactggaataaagaccattatcccttaacctctgtccccacctaaaaacaaataacacagtgtgctttgacttatctctgcttctgttagcagggggtaatgctcattctctcccaactcctcattctttcatttttgactgtttatttgtgtttttattttaggctatgtttgactggctagataacactgtgattaaactctgcaccatgccccctgttggcactgacctcaacactgttaaagatcagttaaatgaaatgaaggtttgtatctgggaatggcttttgcagcttctgaagaatagctgcttctgcgggccctttgtagtttttaaaggcttggttcaatgttagcattaagtatgtctttgataggagttcaaagtggaagtttaccaacagcaaattgagatggagaagctcaatcaccagggtgaactgatgttaaagaaagcaactgatgaaacagacagagacattatacgagaaccattgacagaactcaaacacctctgggagaacctgggcgagaaaattgcctatagacaggtaaggcaaatttgcaacttgtataaatgaactatctgttgttttctagtttcttaacaaaaatttcctttatatccttttctgagcagcataagctagaaggtgctctgttggctcttggccaattccaacatgccttagaggaactaatgagttggctgattcacactgaagagttgttagatgctcagagaccaatcagtggagacccaaaagtcattgaagttgagcttgcaaaacaccatgtaagtattttaattttaatctctaagcctatttgtttgagacctaatgttgccaccagaagccttttgatttgtataccataggggattaggcttgatgatagtgatagagacaaattatgtcgtttaacattttttaggttctcaaaaatgatgttttggcccatcaagccacagtggaaacagtcaacaaagctggcaatgagcttcttgaatctagcgctggagatgatgccagcagcttaaggagccgtttggaaactatgaaccagtgctgggagtcagtgttacagaaaacagaggagagggagcagcagctgcagtcgacactgcagcaggtgtgtgcatcgttgaagttaggagcgcagagctgtgcacctaacagtgctgggaagaaagtctgagtcagaggaaagcaatttggaattcaaatatgtcttgagaagatggtccattctatcccaggacttgtctggaaagaatagctttttattggtttgtttttggtttttttttttttggattacttcaaagcctagtatctttaattatcataaaaagttagtaagtgttcaattatcacaaaccttttttcacaaattcagatacttcttgaatcaagtcagatccctccatgttcagcagtacctcaggcaactaatcagttcaccagatgatgtcagacttctctaatgccgtagcggggtctgaaggattcacctgcattctaacagtgaataatagattggctccatgctaatccaacagcagaacaaattgcctgagcaaactccaaaattcctccctcaaaatagattcctcatatggtcatttagaaagtttaatttcgaagctgagaattggctactgatattgctgatacgtcttttcttaaaaggcccaaggtttccacagtgaaattgaagatttcctcttggaactgactagaatggagagccagctttctgcatctaagcctataggaggacttcctgaaactgctagggaacagctcgatacacatatggtaatggagaattcttcaaactgagcataagtatcccatattccgcagctccttttttcattcacacagatatatgtatctggcaatctgcaaagtccttcatatatacaaccttagggattgttgcttattcagggcttttaatgccttgccataggcagctagtggaagggtctaatggaaattggtgagctggtaaattttgagttgatcagttggattggcactgtgacattgacttgaaggtgagagcgtcgagacgacaaatacataacacagatgtggttgcatttttaaaaggactacttagtgtgagttttggtaaaaccagtaaatgacagtatttcaagaaaatgtgctaagaacaaaaagcaacataatttcaagacaagtcctttatgaaaaggggaaataaaatactggggtctgtttttttgatctctgatcttaaagaaaaaattttttgctcttttcttggtgacagaattattttaatattaaagaatagtgggtatcattccacagtaactcagcagttgaactgaatccaaaagaaaggcttttgatccaaatgagaccttctgggcctattcaggctacactactaaatctgcatatgggtgtcatccagggaattaagaccccaaagaaataagtgtttttgatatctttgctacttttcttgtaggaactgtattcgcaactgaaagccaaggaagagacttataaccaactgcttgacaagggcaggctcatgcttctaagccgtgatgattctgggtctggctcaaagacagaacagagtgtagcactcttggaacagaagtggcatgtggtcagcagtaagatggaagaaagaaaggtattgttataaaatacagtgtgtgattacagagcttgagtagtttgcttgatggttgcatgtaaattaccaccttgtttctatgaagatttttcaaaggctgatatagcagaacttgcagaactggtatcatcagaaatggcgtcatactaatcaagctgtcttcttggcagttaaatttctgtttcccgtctgtgtcaagttgtcttgctggtactgggagaggttcaaacccctgctgaggatttagttttctaacaagttctctgctgagaatttgtatttctaagaagttcccaggaagttatatgtaagaatcacctggggatcttgttaaaatgtaggttctgattcagtacatgtgtggtagaagtgcaaattttcagtagggaacttgttagaaatgcatactctcagcaggggtttgaactggcacaaaccagttggaagccctgggtactagtttctgccagtatttcgtattcattccttttctacaccagtcagttaagactttactgcctgtcactactcaatgacagatggactttaaaaacaagattttgtttttagttcgtgacttgggcttaggaaggtagacggggcatacagggagttagacgaatgtcacacaggagtttggtttctagtgtaagtgcagtgtgggagaaaatttactaaatcaggagagaagtatttgatgtggcctctcctcaaactcttcctcataaaacaaattatcttctctgcaaaaagaggatcaaggcatttgtctaaaaagagtgttcctttatgagtatggagtttcactattctgcgctcgccagatcagatgtgcagtacaggttcaaatctgtcggccacatccattcgacaggtagttactaagcgtgtctgtagcaggcgttgtactaggtatatagaggaaacaataaaggtgtagaccctacctccatagaatttaatgggcagaaggacataaaacagtcacaggtataaatgaacgttttaagagaagcgttaatttcctacagtgcttctagcgtggggtctagtaattttgttctgtgaagaatggctagaggatctgagtatatggctctattccagttgttgtacagtctgtcatctatagttcctgtggaaggcagaactaagactgactaaagaaacagcagattctggcctgtactcaagaattttctagagggttgtcccaatagtggggtggactcccttaagaaatcattgtcagtgtaccttggtcaagcaaagggtgggcgtccagggtaattattttttattttgagggaacattacatatcaaatttattaaatgtgtttgatactctgttaaagaatatataggtaaaaacaatgtggaaacaattcctaccatctaggaacttgcaggtatattgatagatttgattttgccacttgatttgtttaaattgggtctatgcattttataacatccattgtagtattttctcaggttttagcagtagcctgaaaacacaaagaagaaaataaaaatcgtgtagaaaccagtcaactagaattaacactagtgtacatctttgggtttttttttttttttttccttcgaatacatttagatatattcatttttaacaacctgtcatgttctgctttgcctgcctgttagatgggccagaggcagaagtcatcaccaaggtgtagaagtctgaggatggagcttctggactatgtgggcttggggtgtacttggggagagtgacacttgccctgaatgagccattgttttggccatcctgatttagatcatttagcataaagaaacaaagtccctcaaaaattatatccagtatagtcaaaattttgcctagaattccatggcgtgtttcattaccttttctgtttatggcataagcataggtttcagactaagacattttcagatgctgtattttatgaaaacatgtatttaaacagagagcactgcagtgaagtacttttcttttagttgtttttattccacgaaaagtacattaaaggaagcagactttgcccaaaccagactgtggatcctgcagctgtcccactaaagggtctgttccctcacattaattgaatagttttattcctgttctttaaagtctcaggaagcggagagtggcagagaaagcgcccagatgctcattgtgctcactttttccttttccatgtgcacggttattgtccagttgtgtcagtttcagaaactaacattaaatgtccccttctttacaaacagggcatgtctgaatgttgattaaatgaggcttcctttttagaggccatttcatttggtgtacaattcacatctctgtccatgaagcaataattcctgaatttggcactttttctttctttctttttttaattaaaattcagtcaaagctggaagaggccctcaacctggcaacagaattccagaattctctacaagatttcatcaactggctcaccctagcagagcagagtttaaacatcgcttctcctcccagccttattctaaacaccgtcctttcccagatagaggagcacaaggtaactgtgacgttatgatgttggtgctttcctttggaaagcagttggaagaaatgctcccccaccttacctcaagttttaaaaagacaatatttttgtctcaggtttttgctaatgaagtaaatgctcatcgagatcagatcattgagctggatcaaaccggaaatcagttaaagttccttagccaaaaacaggatgttgttctgatcaagaatttgttggttagtgtccagtctcggtgggaaaaagtcgtccagcgttccattgaaagggggcgatcactagatgatgccaggaagcgggcgaaacaagtaagttataaaagaaagattctcatttcttaaacaacctcatgctgcatgcattgagcccctggagtggctcttgtaaaagtatggtctagtttgaatattcattcatggtgcaactattttcttatctaattttagttccatgaagcttggaaaaaactgatcgactggctagaagatgcagagagtcacctggactcagaactggagatatccaatgacccggacaaaattaagcttcagctttctaagcacaaggtaaagcagttaattgctcgtaggtcctgagcagggaattcactaaagcttaaaaaaaaagcttgctaaaagtgaaagtcagagctagtcaaaagaaaactagttggttaacattaagaagtcaagatgatggagccagagtcccattttatctagacagaatcctttttctcacttaaatagcagttcaaagtaattgtctggattcactacgtaaaaatgtaggtctttttgaaattgtcatgcattgccgtatatgtcataaacaaaaacttataaattttttaaggatgagttactgcgaattttagttcatgaagtgaactagcgatgttcatcctatatttggttgtcaaccggaaactcaaatttatttcattccaagtcaaaagtcatctcacttttaatatgtttgtttcttttctctttggaaacataggaatttcagaaaactcttggtggcaaacagcccgtgtatgataccacaatcagaactggcagagcactgaaagaaaagactttgcttcctgatgacactcagaaactagacaacttactgggagaagtcagagacaaatgggataccgtttgtggcaagtctgtggagcggtgagcataaatgtccccttcacaggtctgtaagttatcccaaaagtaagaggacctgttactggattccataagatgataagaaagctaatgcattaataacaagctttgcagcatctcttcatagttcaaagagagttatgaaatgactggaataaaatgtattaaaacactgtcattttaaacttgagccttattatattagaaatggagagggctgtaaaatcaagccaacagtaattgaagatcagtaacaatattgagtgctctcaccttgtgtcatgagacactgtgcagagcctctatatgcattatctcatttaactataataatacctgacctttactgagcacttggtatgtgccagacagtgcccactaaccatttaatccttacagcaaccactgaggtgggtactattgccatatttttacacaaataattaatgccttgtatgtttgtttgccaactgcgccctcctctccacccctgagaggcatttttataagtgcccctgtgccattttttttacatctttctatgaaaaagattagcaaagcatgcttacgaaaatacctcatggtagaagagcactgttggcaagcaaacatagaaggcacacgttatttttgtgaaaaataaaatattagcccattttacagatgaggaaataaacacaaagagaatacttaattcccccaaggtgaattaggctgctactaagtggcagagctgagatttgaacctaggcggtttggttctatagccggtacttccatccgctgtcacccactgtgtaatgctgcctgacagttactactgtatgtctatgagttatatatttgtactcttattgttttttgttttttggttttttttgctttaggtgaaagtttatagctcaatttctcatacaaaaatttatacacatagttacatggtactagttgcaatccctataatgtgacaacacactcaacccaggtttcctgtgtccctccaaccagctgctgtccattcctgccttctcatcctgtctctgaacaggagctgcccatttgatctcatgtatctacctgaactaagaagcacactcttcatgagtattattttatgtttcatagtctagtctaatctttgtctgaggtgtgggcttcgggaatggttttagttctgggctaacagagtgtccaggggccatggtttcagacgttcctccattctcagtcagaccattaagtctggtctttttttgacgtgaatttgagttctgctccacaccttctcctgctctgtcaggaactctctgttgtgttccctgtcagggcagtcattggtggtagccaggcaccacctatttcttctggcctcaggctgatggagtctctggtttatgtggccctttggaaaccctggtggcgtagtggttaagtgctacagctgctaaccgaaaggtcagcagttcaaatccaccaggcgctccttggaaactctatggggcagttctgctctgtcctatagggttgctatcagtcagaactgactcaacggcaacgggtttgttttttgtttctttttgttgtctcttgggctaatattttccttgtgtctttggtattcttcagtctcctttgctccaactgatttgggatcaatcagtgtatcgtagatggctgctcacaagcttttaagaccccagacaccacttaccaaagtgggatgcagaacattttcttaataaattttgttatgccatttgacctagatgtcccccaaaaccatggtccccagaccccagcccctgctactctgtcccttgaagtgtttggttgcattcaagaaacttcttagcttttggtttagtccatttgtgctgacttctcctgtattgtgtgttgtccttcccttcatataagggttcttgtctacaatctagttagtgaattccccccaccctcataaccatcaaagaatgttctcttggtgtgtttaaaccttttcttgagttcttacagtagtggtttcatacaatatttgtccttttggtactaatgtcactcagcataatgccttccagattcatccatgttgtgagacgtttctcggattcatcattgttcttcattgttgcatagtattccattgtgtgtatgtaccataatttgtttatccattcatctgctgatgggcatttaggttgtttccatctttttgctattgtgaacagcgttgcagtgaatgcaggtgtgtatatatctattcatgtgatggctcttatttctctaggatatattccaaggagtgggattgctggattttacgatacttctatttctggctttttaaggaagtgccaaattgatttccaaagaggttatatatcattttacattctcactagcggtgcacaagtgttccagtctctccacaacctctccaacatttattattttgtgttttttggattagtgctagccttgttggggtgagatggtatctcattgtagttttgatttgtattactctaatggctaatgatcgtgagcatttcctcatgtatctgttagctgcctgaatgtcttctttggtgaagtgtctgttcagatgctttgctcatttcttaattgggttatttgtctttttgttgttgaggtattgcagtatcttatagattttagagattagacctttgtcaaatatatcatagccaaaatttttttcccagtctgtaggttgtctttttactcttttgtgaagtctttggatataagtgtttgatttttaggagctcccagttatctagtttctcttctggtgttttgtactctgacttttttaatgaagccgctgaggttcaaaaaggttacgagacagcccagagtcatacaattggcgtagatttaggagttgaactcctgtctaactccagaccttatctaactcaaaactgacattctctactgcaaggtagtataattaacacagaccttgtgtcattagggtatgtccagatgtatagccactgaactataagatgccaaaagggcatctgtatctgtcccctgtactacttaatccattcttgagagcagtttgattaaaaatgtctaggcatgtctcagtcacttttttttattattatagtgatacacacccaataaaacatacagcagttaatcaatttctacatgtacaattcagtgacattcattacattcctcaaatcttaatcagtttgaacagtatttctaactgttcaaccatgaggtccctctctttatagagttcaagcagtattccctttgagcagtcagaactgtggaccattcataaaaagaatccctgaacatgatagagtttgtgtgttttcacaggcagcacaagttggaggaggccctcctgttttcaggccagttcatggacgctttgcaggccctggttgattggctgtacaaggtggagccacagctggctgaggaccagcctgtgcatggggacctcgacctcgtcatgaacctcatggacgcccataaggtgaggggcaagatttggtcttcatggagagaaggctgcttggtcccgtacgtaagcgcacgttctactctatgttaaccgcttagggaagagaaagcctgacagagcctatgtctctgcttgtctgagaggctactccttaccctgtgtgtttaaaccagctgtttctggggttctgcatcagccacagagtgttcaccaaaattggtttgattcacatttggcagtgtatgaacttcactttgaggtcccacccttcctgtttgtgtccctcagttgagtcataaaacaaattaaaatttagatggagaccctcaaagatatccatttctaccgactcccaaaatggaacagagtgcttttgtaactacttctgaacctaagaagcccaacaccatgcacgccaacgttcagcataccctccacattatcccataaagattatagcctatgggacaattctactctgtcatgtagggtcactgtgagtcataataggctgcatggtacacaccaccaccaccagtcatgctgagctgtataatgtcctgttttagtacaaagcattcaactttatcagcttcttattatgtgcctagcagatttgttcttatttaattcccattattttggaaatgttggtataactactcccattttacagatgaagacaccagaacccaagaaagttaaacaacttttccaaaaccaggcagcataaatgcctgaactgacacttagagtcagatcttctggtggttcttctgtgtagattttcctgccttcctctgcataaaagacagaattggaatctaccaagaagaattgaactaaataatacctttctctgtggcttggcctcttgggctcaaagcatttttcagacaaactaactcttctattttcttttctaggttttccagaaagaactgggaaagcgaacgggaactgttcaggtactgaagcggtcgggccgcgagctgattgagaacagtcgagatgacaccacttgggtgaaaggacagctccaggaactgagcacccgctgggacactgtgtgcaaactgtctgtctccaaacagagccgactggagcaggccttaaaacaggcaagacatttgctgggacaacccaaagggtggatgtgagcagatctgttgtcgtttccttgttaggatcagtgccagccagtcttgaacataacagagtcaaaaattggtgctgtaaatattctatacaattttaacacatacttatattagagaaataattaatccaattactgactttttgaagatctacaaatgaaagatggcctttgtggggcttggatagggccatcaaatatctgtgataagacaaaagagctcaggaccccgatgccttccctggcatgccccagtgcctaggaccttggctgcagagagaggtttgaccttttctgctttgttattttaggcagaagagtttcgagacacagtccacatgttgctggagtggctttctgaagcagagcaaacgctacgctttcggggagcgcttcctgatgacacagaggccctacagtctctcattgacacccacaaggtaatccagccccagggtacagtgatctgtgcttgggaacagcagacttcctgtgagaaaagagcaaaaccagaatgggcctggctcattggcctagcaggaatgagagagaagtgactggtttttgtgacaccttaaagatcagcattcattggtttccacagaagtttacatgctggctgtaaataagtcaagcagtgtggcatcatgtaaagaaaaacgggggttgttccacccccattacccttcactggcacacccctttgtttgacttcctttttatcatctttgggccctaatctaatccccgacagccacttaccaagctgcagaatatgatacagtatgtggggcctcattctgaccggtcctaatgaggtggggaagtgttgtttcctcttttcttttttgtgttaattttaccttaccccctgagagattttaatcttggttttgtcattgtattttgttgtgggtatttttaaaatattgtagtgttttatagctgtcatatttgtgccgaggcaatactatattaaaactatgaaaaaataaaaacagggttaaaaaaagagagtagaactaactcacaatagggaaaggggctttcctctgtcctagtctgtcatctctggtagagaaggtcattcctaggtaaactgctcaccttccccgtatcttagaactggaaagaaaatgccagagaaacctccataagggtttttagggatctgtgtcaacacctggggggaaaagtacactgactttttttttcccctcagggcaagctaacagtcctgctagagtagatttcttaagtttttattttaaaatcttttttgtttaggaattcatgaagaaagtagaagaaaagcgagtggatgttaacgcagcagtggcaatgggggaagtcatcctggctgtctgccaccctgattgcatcactaccatcaagcactggatcactattatccgagctcgctttgaggaggtgagtcactggttttaggggaagactatacaggcccgataaaatgaggttatagcaataaaatactatagagtttttttttttttttaaaccaggtaagagtctttctcagtttctcactcactgtgaatatctcatcagaaattaagttaacattttagtaacaactgttttcttggtaatgtgcagacctggaagaatggtgctggtatcgagatatgttaattatctccagtagacacattggatgtactgtttccctccttcctaagatgtaccagattctctctcaggagccggtttcatatcccagcgctgtcgctgggaggagtcaagcctctcgactgctttgggtgctctttcccctgcatgatcatcgtgaagataacatggaaagggctttgaaaatgcagagggatatgtttggctgaaaaaggcaatgctttctttctctccgcacaggtcctgacatgggctaagcagcaccagcagcgtcttgaaacagccctgtcagaactggtggctaatgctgagctcttggaagaacttctggcatggatccagtgggctgagaccaccctcattcagcgggatcaggagccgatcccccagaacattgaccgagtgaaagcccttattgctgagcatcaggtacattaattacattgtgtgaccctcagtgttgcctgcattggtcatggagcctagtttgtttgccacgttagtgttgtactgctgcataacaaattaccacagacttagcagcttaaaacaacacacattcattatctcagtttccatgggtcaggtgggcatgagtcagctaggtcctcttcttagggtatttccaggcttagatcaaggtgtaggccaacgttagagttctcatctagagctcagggtcctcttctaggctgcttcaggttattggcagaattgattccttaacggtagtaggactaaggtctccattttctttgtgtctggcagctcctagaggcctcccttgggtctttgcacttggcccctcatgacatggcaacttacgttgtcaaaactgagaggagaaactctcctgtttcctatgacagagtcttatgtaatacagtgtaatcaagcagtgactatcttgtcatattcacaggtcttgcccacactcaaggggaggacgttgtacagggcctacaccaaggatagaaatcttgggggccaacttagaaatttgcctgttacaccctatttttaatgaccttccctggaaccaaggacccattggtttattgccatttcatccaggttcagaaagagctcttgcatgaatccagagataggctaagaaaaaaacacatcaaaccaaactgaatgaaggagagatcagttgaaccatcttactaatacatcctatgaggcaaatagggtttttaaacatgataacttatgctgaatacaagcatgtgtattacttagttatattatgggcagtgtctttcagtgcatgtgaaaaatcaccctcaccaatgagtactccctgtcagatttacctacattgactccttcctgactaagtagtaaagattatcttctttctgctatgccttcaagctctttatttctgtttactctttctttcaaagcttctagatctgtcctctcaatcctgtgtccctcttgagttaccaccatcgtttcctccctcccttttcatccaagcctcttgttctctgtcttcttttctcatttcccacttgctccccagcccattgtggtctggctcccacttccctcccacccccacagaccacttacactgccctgttcacatcctactggctgaatccaacagatgcttttcagtcctgaatttatttgacgagggagatagttggcttttccttctcaaaactcttcttttgacttctgtgtccttccatcttcttgttttcctttggtctctctgatcattatttctcagttccattgcccacttgttaatgttggcattccccaaagtttcatccttccctcttaactactgtcccttcctatagaattttatgtactccatctgcttcagccatcgcctttaaaaccaaggcatcctatatttccttcttcatcttcagcactgtcatctcctaaagtccaaacatagaggcagctctgaaactcgcattttatctttgcctccttgctcgtccccacccctcccttccaaacctgcttcctctctccccatccacccggtcacccaacacagaagcctgtgatgtgtctggaactcatccctttcctataccccctacatctagtcagtcaccaggcctcatctgtcctactttgaaaataccactcagttctgtcttttcctgctttggctcaggccctcatcattttttgcctcagttatttcagtggcttcttaacctgttccccccctccccctggctagttactccctcaccatgattccatctccacactgaatccagaatgatagctctcgaacacagatgtgatcatgtctagtcccttgatcaaaatcctttagttgccataagccaccaccatccctctaccctcctcccctgccccccacatgctcttagaatagaaatcccagtcccttagcctggcacaggcttttctaaattttctcctgcctacctctccagccccacctccaccactctgattgcatccactgatccagccagggactgaaagggccctggctcacaacaatgtcaggcttccctggctttacccatgctgtgccctctgccaggactaccctccccacagtgtttggctgattcttcaaccctcaggacagagctcaggcaccagtctccaggtggcaccatcttgggctgtgagcagcccaccctaggtgctcctttggtaccctgacttcctggttttcatcatttagctgtttgctccttgaagcagaggcgatgtcttactccttcaggtctttagcacctgataaagccccttgctcaatcatgtttcttgaaaggagtgagagagtatgtgaggtcatccgtcagttggtcagtcagttatgggcttggccagtgttaataagaagttacctaattccatctgagtccaagaaaactctcaactctttttcttattgtttgcatttaacagatgtttatggaggagatgacacgcaaacagcctgacgtggaccgggtcaccaagacatacaaaaggaaaaacgtagaacccactcatgcacctttcatcgaaaaatctcgcagtggtagcagtatgtttgcaggccgctctgttaaaatgtttcattcctgctaatagaagaaactcacttttcttacactgacagtaacagcactccattttcttgggttggcatgaaattttgaggtggttaagcaaattcttttgcagtggcctttccattgttccaatcgtcagtgtaggctgtctgcatttggtttacactagtttcatcatcaactaagttagctcctgtaaagtccattactttttgagttgacgtttcctcagttaaggcaggacagaattgggtgcgattgtagtaggaaagaagcacttgttggctggggagagaatcaatagttctggagttactatgcttccatatctaaatattgccagcctccatatttcttatgtcaattactgactagatattactataaagaatatctaagtttatactttgtaatgattgtttctctttatgaactgaaaaccatcttttctaatcttgtggttattttttcttttagggaagtccttgagtcagcccacacctcctcccatgccaatcctctcacaatctgaagctaaaaacccacggatcaaccagctctctgcccgctggcagcaggtctggctgttagcactggagcgtcagcggaagctgaacgatgccttggatagactggaggaggtaatggcccgctaagtgactttctgtagagggaagtgacttttgatcaaaagacagcacttctgaagccctcttaatatgatctgtgtgcttcaacccccttattcagtagtcaaaacaggcccctgtatgataaaagacttagatttgtgaggaaaatactcagggtagagtttagctgtagcgtatggttatggaaagcaagaagccagccagtccatatgagggtcaggcctgtaatctgatcctccacagcactttgctgccaatgagaatcaagaaaataacttgggaaagttatctccagttgtatagcttatcacagaaatgaccattattaatccctttgtttaaagatataagctgcaaaattatgaaataagattaatttttatgatcttgctattatttgtctttactagatcacaaaatgcaaatttattttgaagtatcattaaaaacccattgccgtcaagttgatcctgactcctagcgaccctgtagacagagtagaactgccccatagggtttccaaggctgtaatttttatagaagcagattgccacatctttctcccactaagcagctggtgggttcaaaccaccgacctttggttagccgctgagcactaaacgccaccagggctcctcctgaagtatcattacccactctacaaaatatgttattatgcttcccagtttccaaaacaaacttctaatatcttttatgttttttatttgtgcatatcaaagcagctatgcctggaagtgagtgttccatgttttttgttgttatttctgtaggtcagttgagttttaagcgtttttggtctttagtttttttgttttttgggttttttccctcctttccttccaactttggagtttgaaagactagggtggggggaaaccgctgcactgtttaggtcattctgagcgtgtatcactgatagagttcaagtgctgaagatcaccttgcccactacacaggcctgctattttctctctcaaggccagtatttaacacggaagtcaaatgggcagtttgctccctcattgaggtgccattccaaagaaacatgcttgggttcagggttgggttcctaatgccttcacccagaactccaattatctcattgaagtctcagtggaaaatgatgggaaacatgagccttctcatgtgggctgtatctgtggtcatcatgcctctcaaactaatgtaagtgcagggtgctaaggacctcctttctggaaccattccttcctatctgagagggtgatcctttaacaaagtccaaagggaaagcaaggctggctccacccatttttgttctacgtactctgtattttccatggtggttcagttactgtttctcccactgttccattataccacagcttgtgtaaataatcgcggctttaataatctcctttgggaggagccagattgtaccttcaccaatgggacaatgcagagataacattgttggtgtgccccccacctccccggaaggcctgcatggctttattggacgtctgagagcttcagtatgatttgggatgtttgagggtcacaaatgatagctcttgttgacacctctgatttctgtttagttgaaggaatttgccaactttgactttgatgtctggaggaaaaagtatatgcgttggatgaatcacaaaaagtctcgggtaatggatttcttccggcgaattgacaaggaccaggatgggaagataacacgtcaggaatttatcgatggcattttagcatccagtgagttcagaaataattccagacacaggagtttcttgcgctttctttgtagaagcaggtgatattctggtgaaatagtctttctgaagttaacgctatagtcccaggaaagaagtaatgtatctacttagtaaaattggttttgacggagagaagaatctttgactgggaattaaaaaaaaaaaaaaaaaaaagcagatctggtgtggcacattgtggcaaacaaaacatgtttggtgtatagataaggagctaacttttgtgaatgatgaggctctaagtaaaatgttttaaaaaaacttttcatagtagcagtttctgacatctgtgtaacagtttacaaagtatatggcctcatttatttttaacagaagaaataattaaggcataaagtggctaagtgacatgtcaagatcataaaacgtgtcacagctgtgctactttacatgaagtggttaggaaagttctgtctggagatgacatttgatctgagacctggatgatgagaaggttccagccatgtgaccagttttgggggaagagatatagatagagaaacagcaggtacaaaagcacagatgtcggaatgaacttggcatgttctagggatggaaaggttaacatagctggagtgtcatgacctaagtaggagagtggagagagagagttggaagggaaggcagcagccagaaattgcagggccttgtaggccatggtaaagaattcaaattttagtttagagacagtgggacagtgcgcagccaccagaaattttcagctgaggaataacatgctctgatttatgttttaatgaattactctggctgctgcaaatattcacatttcccttttgaaaaacagtctggcaggaacctaaagcagtaatcttaacgtagaaaaaaatcttcatgctattccaaattgtcactattctgaaataacctaaacatccagcagtagtggaatggataagtaaatttttaagctgggtggtaggtgtatgagtggttgtagtatttggcctttcgttatatctgaaatattactttttttttttaattgcatgaggtaggggagcctataagcaaatataccaaaatattaacagtgagtagtctctgtgctgaatttatgggtgatttttattttctttataatattttgtatcttctaagttttctaaaatggacaaatattgcttctcagaaggaatcaagacataaatatttttctttcaagaagtgtttatataacctccaaaataaaccttgttaatgtttcaaaatgtgtttcctttttgccagagttccctaccaccaagttagagatgactgctgtggctgacatttttgaccgagatggagatggctacattgattactatgaatttgtggccgctctccatcccaacaaggatgcttatcgaccaacaaccgatgcagataaaattgaagatgaggtgtggggaataattgtatttcaagtatattcctgattatgggtttttactgtcccgaatttggctgagtacgtctgccatgttggcccgttgactatatattgggaggcagttatgtgaagctctgttttgggatctcctttgaggtgacgttgagcagagagtcccagaggacctctttgactgttgacatctagctcagctcagttgaattgttgctgaagtgagtcacatctgtgtggttctctaaattttacagagagcctttccagggtaccacactcgtcctgttcacagggaccatgttgctaagaactgtcttgtctctcagtcctaagcatcctacctcagagtccaggggaatggtcttcatacatagcatctaagggatgaaatgtaaagtactgtttaagatcatgtgtaaccacagagctttctgcctagttaaaaactgtattatatagaatatagtgtcacattgaaaatagcaaattatttagttttttgttgttgttgggtgctgttgagtcaattccaactcatagcaaccccatgggacagagtggaactgcccgatagggttttcttggctgtaatctttatggaagcaaatcaccaagtcttctcccacagagccactgggtaagttcgaaccacagaccttttggttagcaacaagtgtttaaccattgcaccaccagggctccttcagattctttagtagcatgtaaaaatcccaggagtcatcgatggcagatcctggaaagggagaggatgccagacaggtcttgggagcagccctggaacaccccaggactggcttccagggaatctcagactcataggttgaaattcaaatcagttcataatttgctttactagtctgtttattttgatgtacacatattagatgtttactctgaaggaattttcaagcaggctggaagaatgtgttttatgttacttgggaatttctttcatactctgactttcttcctccatgtctccattacctcaattagtaagtctaacatttatttggaatagaagataaacacatacgtcaaaagcctgaaatgcctaaaaaatgaataatgaatagcttctgtttacatgtaaaaatctctgtttctctgaagagtaagtcctgctttccctttcacacttttcttttcttgtctacaaccaataggtcacaagacaagtggcccagtgcaagtgtgcaaaaaggtttcaggtggagcagattggagagaataaatatcgggtaaggaagagaaaaccagtcctttgtggtggttgtttcctcacaacagagttgatccttatagataatcaacttgacgtgtagcagactggataattccaccttccggctactgatgcttggaggcccgagcccatgggacttgagaggtgttcagactctgaccctcatctctgcagatgtcaaatgtcaggtgtcctgtcctgttgggctaagcttggtgtcctacatagctccatctgaaggatagtgtcctatctagctagacagtaacttgtacttgagttacgagataggagacatttcagagccttctgtttatttcactctggtcaaagtctttagggaaatgaaggtaccttaccatgaaataaagaaaaaattgtatctaatgactgaccattcacctccaaagggccacatggcagctggtcattgtgagcctgagaagctctaaggctcagagaatgctggaaaaactgtgtctgggtcccaagggataccctgtgtgctctggactgggctacaaagggacctagatgtgttaggaagatgccaggcttagtggtcttccctggaaagctgtgctaagtgtggctgtaactgacagccattcttgtgttttagctttaagaccattttcaccgggtgtagaaaggacctgaaaccgagctcctaaaatacattcaacagcctgtcaggattctttaaagtcctaaggaaaatctaggattggccaagagggtttagatggccaggtctgattgcacggttatgtgtactgagttaggaaaatgtggactccgttagtacatcaaaaatgtctccaaggtacgtcagaaccgcagtagactgctgttagctgggagtgttttcatggttttgccttgaatccaaccagggcatttagttaataaaactccaggtaatcttacacttgcttgttgggttttgttttcttgttttttaattgcctatgagagaaatgagttagcaagaacaacatatattggagaagttagaaagttaggtcttcttcatttgtaaaaccacatccccgtgacaggagctccataagaatgtggtcagcgtgtgtcactctgcttgaagactggtaaagtgactatgtgattttcataccttagtgttaatttcacaaaatgttcttttttttttttttccttccattccctccatcctttattcttattgtctgtagttcttcctcggcaatcaggtacagtgtgccttgcaacattctctttctcagtggaaatggtctgtgtagttaatgctgcctgttctttgctgtggggagagaatgtaatctgaagcatgcctgggtcacatctggttgtcttaccaagtggagaaactgtgaaaacaaccagtattgcaaagcaaaagaatataaatacatttttcaatcaaaatttttaggctaaagacagtggtattctggactgagttataaataataatggtccaggggacattgagactatagtatcaaaccattccactcctaaaaagagtctggtctaccttggaagtggaaacaccacacagcacagtctgatttatatctgtctttttgacagtgaacacaagttttataatctacactgagtgaaaaaatcctgggttgctttagtactcagtctgtttaaatacgttattaatatttttacaggttatcctcaatttacaacgtagccgagttatgacaaattgtacttaggactgttcattttgtttggatttttgtacatcattagtaatatgcactacatacgatgttgcagcatgtaatttgctgatatcattctcatgccagcccccaaagacgaagatcggatttataaagatactgataataaaaggcaataataatgaaaactaaaaaaaaaaaaaaattgaggtattcgacttacttacatcagaactgacttaggacggagttgtcagaacagaaccctgtagttagttacacttgagaagtgtggtgtggaaaccataattggctgtagcctgaaccttgctgattatggccagccaaccaaaatctaatgggatcaaattacagatgtataaaaaatgactccacttggtaactttaacccttcacatctttccgagggctctggggtcctatgtctttaagtggaaggaagttgcatgggtaaaatctgtctctgatatgaaattaatactactaagtttatttgagatcctcaattaatgttgagttccaggcactataataataactaattacattaacattcaggggcagtgagaaaaacagaggatgggaaaaaactaaaaatgaggacaaactggctttaaataaatcattgcataagagtgccaagtagagcctgtttgctaatgactacacgtgggtcctagggagttctttgaagtggcaccaacatctcctctaccgttccactgaccaggcgagggtcagatgggtttgttccagtgttggaaacaatatgaagcttcaaggatcacatgcctgtgattacacagctaatgtcagagccactgctgttgcctgacaaccacctctgccaggttttcccaggccaccatttttagagctgccataaccccttcaaccagtcctcactctggcctcaacttccctagctactctggttgctggcttgggtcaaaattcgtttccccatagcttaacagaaacaagttagagtctttcaaagagaggtttagtaaaaaaattaaaagccaaaaatgaaataaatggcataattctaaaggctgacaggtaaattgcagaacacagaatatgtaacctaagaataaagtagctctttcctgattcactctggtacatgtacaggcccgtagtctcatcttgccctcacccatcaagagaaaacccttcagctcttcccagaacctgttcccgccccacacccccattctcactcattgggcccagcttctgagggcggcttctatggaggccagcgggcagcttctttcccaggacagggtgtctattccctcacatctctgggttcccacatcagtgctctttgtactacactgtgctattgctgtagtcactttgaatgaatattttaaactgtacgagatgaaagtgtaggactttttattttcaaaataaagggctgagggggggactattttttcagtcaccttgcctgtgcaaacagtgcatttgagtcagtgcggccatgcaatacagtgttaccacagatggttttgagggaggttactatgtgtctttctcaagcatcctttctggcattttcaatttttgagccttgtttcaaagttttgatttccctttctaactttgcaaggcctaatgaagtccctctcccccacctcttaggaacattctggaatttaagtaattttaggaatttcatttctccagtcaaaatgttttatttttgctttgggatcacagcatgctcctcttttgttgccctttacttcattttaggacaagaatcatttatacgatggcaaactccaaatattaagacagattggaaagtagaaaaggaaaaaataattatcagaaaatcatgcttgttttaacatcccaaaatgactattgactacaatttgtaatcagcatggaaagttaaaattttaattcattcaattaaattttagtataaatgatatctaatcatttgttcagctgaagaaacttttctgctggtgacatcgtaattggagaattcttagggtttattactgaaaatctgacacttaaaatcagatttccttctaagcttgtaaggataatgacgctttgcaagggtttccttaaggctcggaatagtgtttactcttctccttttactgttgagcacgctgtattcagaagttgacatccaccttttcttttatgaaagtaaattagtatcaaaaagaatgttgggttttaatttggttggaatctttaaaggaatcaaagtgggggaatattttgtctcctttcccctcccccatttttggtacaggagagagggtgtgacctttatcccagtagtatgtttgatgtttctgtctttctgggtttaaaaaaaaaattatgaaaaatttaaaaattcaaaatatcatttcaaattctcccaaaccatcaaattgtccttcctgtctgaatacagtgtgctttggaaagaaaaaagcataggcctgctttaaggtacacttactaattaaatcttccattgattccacagtttggggattctcagcagttgcggctggtccgtattctgcgcagcacagttatggtccgtgttggtggaggatggatggccttggatgaatttttagtgaaaaatgatccctgtcgaggtaaggaaccatcctgagcatgaattacgtgctaggtatgtccacactgttgatgttttgtgttttcagaaagtgttgatggtggagtctgtttgttggtgttctgtttcgtcgtaagcagcccacgtgtggtcccaccagcacagatgagaactcacggtgtgccagtcagagtagaccagggagaagcagcaggaggggccgatgctgtcggggcagacagggcagggaggaatgcagtgataagagttgagaatgtattggtattgtccgaatctttgttgggggtgttaaattactactggcctagaagggagcccgatgaagccctttggattcccccttagtgcttcactcctttgcctgtaattccagcgactgaaacggggggagggattgggcccttcccatgcctggaaggactggtgagccctcttgaccaggagggaggataaaggacacctagcagtgaggccagacacctctaagacagatgctcacctaagcaagaccatggctatctgtctaataaccatgaaaaggctggcacaccagtgcaaaggtgagagaaaatcataaatttactatgagcatgactgatggcacctgcagctacaggcgtgtgagggctgcagccagggagaaaataccagttgctaaatcctctttgcctaggtcctttactttctattgttagccaagctgcatgtgaggataggagtctccctctgtctgccactttgtctctttcttgaccagtttctgcgtttcctgctctgtctctgtttctgtgtgtttatgtattttttttattctagttcaccatcctgggagtaaaataaagcgctctgactccagctcttcaatttccagtcagtctcccataggttggcttttaagctttgtccctcttacccacatcctagcccgttgagaatggctttgcttttcaaactgtaacacctcttggctctgtgatacctgttgcctttatgaatgctttgaaatagccaaaccttagcttttctaacttctgtgaattgacagggcagaaaatacgccatgagacagcacctgtgggatttgttctgagtttgtatttatttaacaaatacggcttcacgtgccacacactagtataagcactttacaaataataatacatttatgccacatagccaccgtatgagattagatgttactattatctccacttcacagaataggaaattgaggcagagagaagtcaaataccctgcctaaggacagacaactagtaagtggcagaggcagaactcgaatccaaagcaatgtgtctcttaaccacagagctgtgtgtctcagaggccagcatacccaccaccacccctttttgtgtatatttttggtccagcctgcataattaagttattaaggcttatttataaatctagaagaataaatatttacagtacagttatataacttttttggaactagtttatagtcagattctgaaacatttaaaggggacagagcaaaagagtgcagttctcacatgaattcaaatgtgtccacgaataattccttttattttaactcgttctaaatttagtaaaccagagtgaaagctaaggagtattttcactgggagttccttttctaaaaaatagttcatctttgaaagcaacttttctgatgaaaacttgaaagggtttaaatggggaacaatatatattattttaacctaactcagtaaaaaaacaacattattccttttcaaatctattgataaggttttatcttttcttgttatgtattggactaaacaaaagacatactgcatgtggcattttggaatccctggttgcctgtttatttgctgcttgctctacttgctctgtgtaacattatgctgctggccaaggagaacactgcttgctttgtccatatcttagtatctaaaaattgggaccccaaagaaatttgggacggccatctcttagctattttctgtggaacatagtagcccttttcaacatccattggagcaaacaaggtaaggctttcttctgtgcttctcaaggagtgctttcctagagctcaataattaccttgattccattgattgattgtggagtagaaaactctccaacatttagatatcataactctaccagtgatggatgggatgagctacttctaatcaaacaaaaagtagtgctttttttttttaatctgctgggtggattttaatgagtgacttggaggggcatgaacattgaaaggagaaaaaagttacatgaagcctgtgtagggttctccggttctccaaggattgatgtggcttcttgcagcacctgttcatttatgttgcatttccttgggtctctggtctgtagagaatgttacactgagtatagtacaaactttatgacaaggttgtaataccaatgtgcactgtcatttgtcatctccttttacacagctgtttaaaaagatgaacaatatctcacactgcacgttgccttagccacatgtaaaaacgtaaaaagtgaaaatattccaccaggcaggtttgccagtagtacaatctcctggcacttcgaaaattagagatttcaggttctgatggcatccatagcaaaggaaatcatgatgttttggacagaaataaaaacagtgtccctgcctaaagaatgggtacctagggtactgtgtgtgtttttgagcattagaccgattagttttcccagagaggtaaagatctagaaagcgtcacttatgaagatttaaaaggcatagtttggctaagaactgagttttaactaacgtgtctgttccaaccaacattggatggtcagtataagtcccttagaaaatggtagctttttggttatgaaaagccgtacttaagatggccaccttcagggactgttccttgaggttcatcattaaagctttcccctgaggggaaaatctcatcagaatagtcaaacatgtaataggaatgtcctctttttttttgcctttacgaacataatacccaatgctagggaaatatatgacatcatgtaaatactaaaaatacctttattactaaattcaattgctgttaacctttgcttaaccaaaacttggttttcctttgtattttgagaaaaatgtttactttttacccttggaactgccccagaagttaattcatagcttccaactgtttggagcccaaatggcacagtggttaagagctttggctgctaaccaaaaggtcagcagttcagatctaccaaccgttccttggaaaccctgtggggcagctctactctgtccaacaattaaacttttttttttttcctccagctttctccagcttatcaaagtgaaagtattaattgcctcttcagttggctgttctgagtgtatttctgaaaaaacagctttcgtttcttgcaaataatatttacctaaaattttccccataaggattcatttctttgccttatgtcttcaaatattctaaaatgaaaacttcccatgcgagttgtggcatattatgctaatattagtcagacatgccttaatgccttagaaagaattaatcatttattgtcctctttatgagatgagaacaccagaaatatgagattttaatactgtgaacatagaggcatagaacccaagaagatggaaaatacagagaggaaagaaaataaaagggggaggcaagcctgtaaaggccaagttatctactctgtcttgtctggggtaggccccaattttaaggtaagccgttatttttatgatcttcttttcacctgagttgaggccttctaaatgagtttttatggaagttccagaagctgcctaactactgtttacagtctcgcattgctctaaagcctagtgtggagtgtctgtggcatggttatagcagcctgaagggatgagggtagagaattattcagtcatcatagcatctctagccggtgaaatactgcttcaggggtgacctgacccactggctggaggtttgctgtggagacaggtctgtctcattatgtttgtttttttatgacacataagcatacctgggaacatgatgaactggaatttcccaacatcccagatgcacccagccagaaaggggagtgaggcaccctttaggcccctgggcagtcacattatagtgtacccagggtctgacatggccataacataggagcttgagatagggtcctgtgataggattaaacaggtcctgagatcacaaaatgcaaagattaagtttgtcagtgataaagttggttattctccattcctataatatttttcttagggaaaactgttctttctgctcttttaaattgctgtttcttttcataatctatatacagtaggtcttggcagtcatgagtttaaccttaatagtttcagcagtaaaattcacggatttgcatttgtgcgggtgtacaagagccagttacatagttggagcgtgagcctcgctggccaccagccccccacacagctctgtgcctctcttctttgtcctccgtgcaatgataataataataatccttatttgaaagattcatgaaggttgtgacagtttactcaattttcagaggctagtaaattctacagatacctgtcgaaaccctaaatatgagcctggcactgggatctaaaggaaatttaagatgatagtccctgcctcaagaagttcacaccctgatagtgtgagcaaacgtgtataaataaatgcccatcattttgatgtaatatgtgagctggagagtgagggagaaatcagtctactcatggaggtgcagagggcatcaggaaaagggagtattggttcagctacatcttagaagtaattcaggggaatttggaattctcagtaaaagaaaccacatgttcaaatgaatagagatgtccacagcaggacaggcagggggaaccatgagtagtcccacatgactggagcaaagcgtacaaggttaacagccataagagtgtggaacggggtcagcaggaatgcgatgagggaaccagaccactgagtgctgtgcacttgatcacatagcccctcctgatctcgatcttccaaatgcatctgaaagatgttaggttaaataggcttctttactgcaggacttctcagagcttagaaaatgctaatgtgcattggggctcttcaaagggagaaatgtagagtacagtgtttacccaaccccttttgtaagaagcgcctcaaaaacctcagttggggtgttctgttgtaagcagcgaaacgccacggaaggactttgagctgttgagagatccaagatttttatttagaaattcagttctggggactgaagagtgagggaagggtggggaataagatgataaacaagatgccagtagacgctgttactgccatccagggcagaagaggtaatacggggaccacataagtgtaaggggagagtgggaaggcacagagggattcaagaggcagttagaaggtgggctcagtagactggactgtcatcaggagggaggaacctatgacagcgcccaggttttaggctcagtcatgtataatcagtctttggatgtaaggttctagcatccaggaggagggtctgcaccagtgaaacatttgggagtcagtcataactgtaggagggcaccgaggtctcagaggttggtcaactcatcatccaggtgacagggtatgagggagaacaagactgcagactgaacccaggggaacatcagtgtttaagaaatggacaaggaagaaagacaaagcagcaaaggagggtgaaggagtcgtcagggtggaaggagagcaggtgtccttgaaaccaagggagcagagtgtttcaagaagagagcagttttttatccccccaatgcaaattataacagcagagaaatatttttacatatcaagttgtcagagttttacctgcacacacacacacgcccttgttacagagcattggccagactaagataaattggatatgttcatatattattttggatagtatacattggtaaaacattgtggagatcagttgacatgtatcagaagccttaagagtacctcctcaccctcatccacttgtggaaatttaccctgaagaaattgtcatggaagtacacagcactgtatataatgcttaaaaaattacaaatacctaacaacgtaggattggttaaataagcagatgctcatatgacgaaatagtactttgcagctcatagaaattatgtaggacgtgcagagtatggataatgtaggtatgatcccatttttttatttaaaaaatatatactgtggaaaggaataaagatagaacagcactataatagtgatgtgatgttccctgggctgtaagattaaggagtttttattttctttgtacttttctgtctatttcaatcttttctacaattaaaaagtattccccagagggcagaggtcaccagtgaaagatgctgccaagagatcgagctggatgaagactagtgtttcttgggtttggagattgaaagtcatcaatgacctttgccagaatgatttcagtggagtgatggggattgaagcctgagcacggtgagggaagagtggagacagctagcgtagagggcaatgcacagagcttggctgggaacagctgcagtggggtgcagagaacagcaaaggcggaagacatcagttctagtcctagctgtgccacatctgtgagtgctttagttcctttctctgtaaaatagggatgctgacaggcctgccgatgacaatcaaatacagtagtgcatgtgataatgctgtataaattgtacgctgcatggggaatatgatatattattacagagagccctctctaaaacacttaaaatatcacagccctcatctgagatgccatttcagagtcttcctctggtattgctgttgttttttcctggtagagtttgcccaaaagtgaactgttaagtgtttactaggtttgaaccacacatttgaagttctctatggcttaggaaggagccctggtggtacagtggttaaatgctcggctgctaactgaaaggttggcagatcgaacccaccagccactgctccatgaggagaaagatgtggcagtctgctcccataaagatttcagcctgggaaaccctacatgggcagttctgatctgtccttataggttgctgagtcagaattctgttcggcaacaattgggtgtggtgttttgctttatatttgtggcttagctatgaacagttctggggtatttgaatcctcacctgagtgaatgatttccattcatcagagtatcttagtgtctactgggtgtccactgttgtgctgggcaccttagcaaacacaagataatcagttactaatgatgtgaaatcttactgaaattaaatacccaggttagcgctggaggaaattctctgagactcattagtgtggacgcagaggaaagtgccaaggtctggaaaatggctgagtagagaacctacagccaaggaacgagcctggaggggcctagagttaggacttgagaagaaaggaaacactggattgcctgaggaaacagcttggtgttccagggactatcgcatcatagactgttggcctagaagggctcttagagatcagttgtcctggtcacctctagtgagcctgagtaaacgaggcccagagcaggacagatcctggctggtagcagagcctggactggaactaggaggctatgaggtccaagttagcactcttaaattttggtatattatgtcaacataatgcattgagaagactttgaatttaagaatttagaactactatgcttggacacccatgtaatctgatttaaaatctgagtatactaagattcctctaattcttgaggacatagtggggtagagcagaaaagagagggcacagttacctggaatcttctaaatttgtggttcagcagttccatgggaagaaagacttggcgatttgctcccataaagattacagtctgtggggcagttctcctttgtcacaaggggtcactatgagtcgaaatggactgcacctggcaacaatagtacattctaacaagtgaacgttttaagatgtatgaggagctatagggttgttacaggatgacatctttctgtgagaaataatctaaagaaaggacatattccagaaggaattatttcttttaaattaatagtgcctttcacatttaacatttgtgttggctttatttggtatcttcttactgaatccagactaagttcagggctttatagattcagaaagccatgggacagcacctgttggccttcagggctgtttccagatttctttctacctggatgttcttctcctacttggcagttgccccttcagctacttactgcttccactttttgacttaacgatttctcatgggcaagttttatgcatggtcttggtctttctctctcttcacatgtttacttcttaatgattctctcccaatttgtttactgtcctgagttcctggacccttcctataggattgtaattgaccgaattaaaatagaagagtctgaacaatgtcaatttctgtgatctgtttttctccagtatttcattgccatgtatcctgcaaaagctgagcaaaaagtacacatgtattgtgagagagaaaagaggggttttgatttaacttcagaggtttgtgaactgctgcatctggtttatcttgatcagttaaacagtgtgcttaccccaggggacagttggcaaagcaagatcataaccacagaattgcatggtactttgtacacaaagaagaagctcttcattaagacttatgataccaaactaaggggcttggttaatgggtctgctatggataaagaatcataacaaggctgactttatctcttattgttaaagaatccacagatgctattaaacctataacttaatataactgttaccatggggtcaagcagctgtgtggctatcaaagatctatttgtccagattaattgacattgtgtgtgtatatttgttccctttttagcacgaggtagaactaacatcgaacttagagagaaattcatcctacctgagggggcatcccagggaatgacccctttccggtcacgtggtcgaaggtccaaaccatcttcccgggcagcttcgcctacccgctccagctcaagtgctagtcagagtaaccacagctgtacctccatgccatcttctccagccaccccagccagtggtaccaaggtaggtactgccttccattatggcctctttcccagtttcccatctttgcagaacagtttgtccattcagtgtagcctctgaaagactccactgaggaaggaacatgaagacatacagaccaagctctacctagaccagggcctgaccaagccctagcagtacacagatacatgatctttaagctgcaaaggacatttattaaaatacaaactcatgctggttagaatcagaaatgtttctttctgcatatttctagtaagtccatgcagaggtattaattttgaaaatccagccactatctctgcagctggagctaacagataagtttgttgttaccatggattatgtacgaagaacaccattgcctttctgcctggtccccttcatcctgttggactgatgagtgtctcattttgttttctgtttctttaaaatgtagtaccttctgtttatttttctgttcccaatttgttccttttcttttccattttcaattgttcccatacttccctttggatttccatttcacagactccactgcagctctctcgctgttatgacaaaccctggctggtaaacagtaaagctggcacccctgtcagggacagccattatcctgacctccagctggccagccctgaggtagagtatggctttgctgactaaggacacagtaaagacaagaccctcgctaatgccacaatcttgaccagctattcttcctgacaccagggtcttttccatctttgtggtgcttgctctcacagctgattcatctagtcacggtgtttttcaggggtttctaactcggagtcaccagacttagagatcagtaagagatgcctaaaacaagatgaaagacttcgtaacagtctttagaatatctgtccaggatgataaaccatggtcattcctggtgatttgtttatgatcaggcctcttggactctccaaatgtcagacacacagacgagttagtaacacttgaaattcaactatggtgcatgttcaacaatgttctatctttgcctacaacagaagagcggttggagtctcccaccctgtgacacagccccaggctggttggtatcaccacactggccaaggtgtgggtgctgcgtacttcacccaagtacactgtcagtgaacactgttctggagctcagattttagcttctgaatttcttggcctaggcacttgggtttcggcagtcttgatttaaacgcatgccagtagttaagtatggtccctaataacaattagtccctaaagtacttacacactttttggaagagcagtgtttttagaaatgaaacatggactagcagcttgcctgatagtggacattttagctcctgctgggaaacattgggttcttgtgcctcaaaagacagtgttgcctttggttagaaaaagtttcagccaaataaactggagaggtacaaaaagccagtgcctatgagtgaactctgctgctttgggatttgtcctgttccaagctaaaatccagtacagaaataaactggtttaggacatgatctgggaacctactgccactaaaaccccaagactcaacctgcttactttgcttttcttcttccttaatgattccattttgtgaaagtctcaaaagtttaaaaattttatatgtttaactatgaagtacaaattcttacatgattctgatcagtttttttgtttgtttttttcttaaggtttcatttttttgttttgtttcatttttgaggtttcatctttccttactcattggtgttctacagtcaggctgtgtcctaacatggaatcctaccctggagtctcgggggctgtcttcccggcagcagtgctcaccatagcttttgaagctggtgctcttcctcctgtatgggccaggaggctttgtgctcgaatgttaatcactctctgtcgcttttgctttctctttataaattaaagaaatacaagaaatcacaatgagatgggttgctttactcttctgtttgtataaagatcttaaaggtcttggaaaacaatttacacaattgatttcagaataaaattagaatagcattctgtagcatgagtgatttttaaaacatctttttctcctccaaattgtctacttaaatgtagctcctgtcagtaacaataataaagtgtatacctggggcagctctactctgtcctatagtgtcactatgagatggaatcatagtggcaaatggcagtgggtttggtttttttatccggctcttttccagtttaggaagtccttctatatatcatttgttctttcagcaagtttttattatgttcttctccagtgccagacactgttctaggtgctgaggacgtgtgagcaaaacaaagcccctgcttttatggagttttactctttaatgtgtgagagacagatgataaacaagaatatcgtagagtaggtggtgataagtacaaaggaaagacaaaagttagacatagttttattttagatttggtcatgaggcaagacctctggctcatcagcagagccccctgaaggaaatgagggagcaagccctacagatatgggggcagggggagcagcaacgggaagcctgaggagggagcccccttggctgtgggagtaacagcaaagatgccagtgtggctgggacggagtgagcaagaggaagtgtggtaggagatgagcttggagaggcagtacttacccatttcctgggggagaagtaaagacccaggtgttaatttggttaagtcgcagaagcccagacttctggctccacattcagagccttgtcccctaagccacagcccccttcacgtacttctcataattatttatttgatccacaaggcaagtaattttatctgcatcttaccaatgaggaaacagggccgaaagatgctaacttcattgaagttactgtatcagcttagtgatggagatcggaatatcattcagtctccatattaaatatttgggtccaaccccaaggtttccagccctttaactttggtacatagtattatctggatttttaaaatttactcatgcatcatatttctgttcattataactattgtagtcttacaatttgaggacttttttccatttctagtggaaatttgtcaacgagataaaaggtactagaatacattctgaattttttaattggaacagaaaatccttattttgggaatcatcaaaataacatgaactagaacaccatcaaatttaatcaccgttttcctggacttttaattttcttttcaatcaatattacatacatcttttaaaattgaatttctgccaaagattttgccaagtaaatattactttttactttttttaaaggttattccatcatcaggcagcaagttgaaacgaccaacaccagcttttcattctagccgaacatcccttgctggtgataccagtaatagttcttccccggcctccacaggtgccaaaactaatcgagcaggtaagtactcgcccaatacctgtgtattcggggttagggtgagagggaatggccaagctaggaacgcagaaacagcagcctatcagagaggtacttctacccaaggagcaaataatgagaccagtgcttgggcatgatccctagaaagagaagcctatagataacctgggggcctttactctttctcctgtctctacaagttcttaccttgccatctgagagcagattcttccacagccacagctagaccatctgtccttgatcaaaatatttgagagaatgtgaaggaaagaagaggcctggcagctggctagtaatttttccagcaacacttccatatttattactcttctggtgagctgagaaggtcaaggaaagatgtcctctgtttacccgctgatgttcctcatgggaacctaggaatgtggcttcattccctggccctggttcctgtcatttcacccctgttttgagtctgcccatgtgtttccccactagcaccattctcatctgtgctgaaacgattcagcagccctacttgaatccattttgggatatgtaagctaacagcgctgctgatagaaacttgtttctaagccttaggaggcaggcttgtcaagccgaaacttagagccataaagccaaaaaagggctccagtagaatcacaagacacaaatcaaccactatgtagatgaggaaaccagggtccaaggtcacacagcatatcaggttaatagaatcagaaccttggcctctggttacttgttcctccaccccaagctgtctctattattaagtctgctgctttgttcttgaattccagaccctaaaaagtcagccagtcgccctgggagtcgggcagggagtcgggctgggagtcgagccagcagccggcgaggaagcgatgcctctgactttgacctgctagagacacagtctgcttgttccgacacgtcagaaagtagcactgcaggtggccagggcaactccaggagagggctaaacaaaccttccaaaatcccaaccatgtctaagaagaccaccactgcctcccccaggactccgggtcccaagcgataa

SEQ ID NO: 3 - DNA, 2250 bp, synthetic construct
  source 1..2250: mol_type = other DNA
atggacaaatggaaccttgcaccacgtgatgctaattctgctgctgctcacttcccagcgctgacacgttcctcctctccccagtctgtgctccaaccagaggaatccacagacaaagtaagcatattgtcaaccttcatcgctcccttcaaatacctaagccccggtgccacaaatccagaagatgaagacaatttaagtaccagcagtgcggaagtgaaggaaaaccgtaatgtgggcaacctggaggcaaaactgctacctcccagcgacagggcaagaggaagtgcgcccagtataaagagaaaaaggcctttggaggaaggaaatagcggccatttctgcaaattgcagctgatctggaaaaaactctcgtggtcagtgacgccaaagaacgccctggtacaactccacgaactaaagccgggcttgcagtataagatggtctcccagacaggccctgtccatgcgcctgtcttcgcagtggctgtggaggtcaatggacttacctttgagggcacaggacccaccaaaaagaaagccaagatgcgggcagcagagttggcactgaagtccttcgtgcagttccctaacgcctgccaagctcactttgccatggggaacagcgtgagcccagccacagacttcacgtctgaccaggctgatttcccagacactctgttcaaggagtttgaaccctccaccccgagcgaggacttcacaggctgccgccccgtgaacacagagttgctctccacggcctatcgacacggacggttactctaccacactttggacctgatgggccaggccaagcccagcaagcacaggatggctcccactgccgagcaggagaagaaccctgtggtggtgctcaatgagctgcgctccggcctgaggtatgtctgcctctcagagaccatggagaagcagcacaccaagagttttgtgatggcagtgagagtggacgggaggacatttgaaggctcaggacgtagcaagaagctggccaagggccaggctgcacaggctgctctccaggccctctttaacattcggctgcccagccacattcctggcaggagtaaaagtcaccttttgccccaggaattcgccgactcagtgtaccagctggtcacacagaagttccaagagttgacagtcaacttgacttccacacacgcccgccacaaagccctggcaggaatcgtcatgaccaaaggcttggatgtcaggcaagctcaggtcatcgctctctcatcaggcaccaagtgcatcagtggcgagtatatcaatgaccaggggctggtggtcaatgactgccatgcagaaatcgtggcaaggagagcatttgttaacttcctctacgcacagctggagctgcacctgagcaaacgacgagaggactcagagcgctcaatatttgtgcggttaaaagagggcggctacaggctgaaggaaaacattctgttccatctctacgtgagcacctccccctgtggagacgcaagactcaactctccctacgaaatcacaacggacctgcacagcagcaaacacatagtcaggaagtttcgaggacacctgcggacgaaggttgagtcgggggaagggacaatccctgtgcgatgccacagcgcagttcagacgtgggacggcgtcctgctaggggaacagctggtcaccatgtcttgcacagacaagatcgccagatggaatgttctgggactgcaaggtgcgcttctctgccatttcattgagcccgtttacctccatagtatcattgtggggagcctgcaccacacaggccacctgtcccgggtgatgactcacaggactgaagacatcggccagctgccaacgtcctaccggcacaacaggcctctcctcagtggagtgagtgatgcggaggtgcgccagccaggaaaatctccccccttcagcatgaactggattgtgggtagtacagatctggagattattaatgccaccacagggaagagggacggtgggggctcgtcaagactctgcaagcatgtgttctctgcccggtgggcaagactttatggtaagctgagcacacggataccaagccatggagacacgccatcaatgtactgtgaggccaagctaggggctcatacctaccagtctgttaaacagcagctgtttaaagcatttcagaaagctggtctgggcacctgggtgaggaaaccaccagagcaagatcagtttcgactaactctataa

SEQ ID NO: 4 - DNA, 98977 bp, synthetic construct
  source 1..98977: mol_type = other DNA
ttaataaatggggaaattaacaggactttcctcttcatcttcaagcttttcagaagcatcaacaggactagtaaattcaactccaaactcttcagaaagtttttttaacttctgttctaagagaatatttttttttacttcttccttgtaattatacttcagatcttcaatttcttcaaaaaatgaaggatcaaaattttccagttcttttttcagcttttttatttgctcctaatagaaacattatctttaagaggtgcacaggaatgtattttctaggtttagactagagagatttaattgtaaacataataaatacagaagtattttaagattttgttaaaaagattacattgtacagtatatacaattgacttattagctgtcaaatcacattatttgttccataagttatgccctatcctttgactaaaatttgttaattttttttagattgtagtggaacttaatctttcttcaaacgcatactcaatactctcagtgaggcagtcaaagcacttggctattcatagcattaaagttattttggttaaaattttggcttcaggcttcatttatattttatttacaaatatacaattttcaataaataatgaccaccttcttgtaaatatatttataattagggcagatccagggcttctaagtacaaattaggcatctgagaaaatgtatataatttgagctttaaaagactacttagaacagccagtgatcgctagctaattctgctattcatgccctgctgtttacaaagtcttaaaagcagtaggagaaaatccttgagaatttcaaaaggtgttaaaaaaaacactgttgccaatgtgacccaaaagttaagaaaatattaatgaactatttttgtgacaaaaaataaatttactttttaatctttcctattttgtctgcatgtttacagcttttgtttgatattttttaacacgttgttaggtgccatcaagttcgctccagctcatggcgaccctctgaacaacagaatcatgaacataatgaaccttgtgtatcaagatcaaatattttaaatataaaatttaattacaggaatttttggaatctatactttacacgggtagcaatgataaaaatagttttcaacagctgtttccccaaaacatttatagttctaaaatcaagtataattaaatatttaccttcaaatgctgcttttctagatctgaagttttgagctgtgtctctatatcttttaccttttcccttaattgatcggtatctgtcaaaaaagttataaaaatgaggctctgctttctctcactatgcataggttcaagacaatttgttttaaagaataagcaagaaacttaaaaatcccagaaccttgaaaattcagcatctggtaaactcttgttggaatattaatatgttggctctatcagctttattccatagtaggcaaagagaagaggcatctactagatattaaaagtgtagaataaggttaatttttttacatagaagaaattcttattttccagagaaaaatcctagaaacaggaacatttgctaggtactgtaagtacaacagaagaaaagtggactgttgggaaccataggccaaacatcagctggtcaaatgttctgttacccaatatagcattggctattccttgtaggtagatacacatttagcctgcaactactaagaaaaacacttacaggcagggcgaagaattaaaaaatgactaagacatggtcctgatacttaagtagaaaaacaaaaatacacaaatttagcagaagagccttcagtttaacttactggatttccccccgggagttaacatacttctaattttatgagaataagcaaataggatctttgctttaatgccatctttgctagataaatcttttaatgtaaattttaattgaagactatatataatgtgtcatgtggtcctattctatagccattggaaggtagccttttaaataatgttaaaatttaagaaaaaaaagggcagcaaacacattttcatgaatgggagaagcaaatgatccaatttaaggtgctccaggaatggtcccctgattataacttggagacaggatggacaagggagaaaaacactttcctcatattattttgtggagcctggtagcactgtggttaagagtttggctgctaaccaaaaggtctgtggtggtattttgtgggattagaataggcagaacccatccttcctttggaagatagagcaaaatatatttcaaaggcctcccttgtgttgtgaaaagagctaatgaatttttagagttgacttagtgtgatattttattgatccagactggtaaggaaataatgcagtaaaagtggatattcggcattttccaagtattaatgactatatttagatagtaccttaggcttataaaacaatcttggtttggttctaagccataataacaatctctgaaatatgtatccttttctccttcacataggcaataaaaaacttgagggttcagaaattccctctgaggaaacagatttagaaagattagagaacttgcctcatagcaacctaaataacagatctttgatatggtgtctagtacagcaggtggcttctgtaagagagatgccaaaagagattgacatttatacttttaagtcaccgagaggcagtgtagtatagtggttaagagtagggagtggtgaggagttttggagttccagagatttaggtttgaagcctgcctctgcacttcctagcttttatgaccctggggataggttacttctttggatccattttatcacatgtaaaatggagacaatactacctattacacaggattataaggagttacagaatgcttgtaaagcacttagcagagtgcctggtacacctcatatatgatcgcctcaatacaaagtagcaacacgactgatggtaagatgttgagaaagtcataggaaatatttaaagactgtacaaatccaaagtggtattattcctttggagaatttggcatttccatcaaactatcaaataatggcatgattaggttaagaggttcaccgtagtattataattgtagaagcttagaagcaaactaaatgtccatcaaaagagaaatgattcaatgtggtatatccatgcggtaatatactgtggaattatttaaaaaatgagatctatatgaacagatacccatgatatgcatgcataaattgttaaaggtgaaaaagctacaaatgtgtatagcatgaatccaagtttataccaccctccaaaaatatatatgtatatacatatacataaaaaaagtgtgtgtacatatgcacatatgaaatagggaaggggttagtaatcatttctcctgaatggaaatggtggtagaaagagactttcttttttactttgtaaaagaagaaacaaatgtaagcaatgttttattttttaaagcaataacagcaaaatgacaattagtaacatttagaaaaaattcttcagagggcttagaagagcctgaacctagaaactagaaacaacagacctagtattcattatttatcatagcaccttgataaaatctgtaacactcagatggaacacaagtagaaaaacacttgagtacttgttactcttatgagagttactgagacccattgctgtcgagtcaattctgactcacagtgatcctacaggacagagtagaactgccccataagactttcaaggaatggctggtggattctaactgctaaccttttggtcggcagtcaagctcttaaccacagtgccaccggggctccataataatcaactcaaagggctcattgggaatatttctgttgcatggagaaaaaacgagtgctaaaaatgtttatcagggattggtacaacagttattggaagtctctgaacaaaaaaggcaaatcctaatttaaaaacgtgggttagttaacatgccgtaagtatgttatgaaatatattaccaggtatggtgctttcatcaccactttggtctttgttaacttctatctgatgcattaattctgctttttctttttccagctgacgattagctaatctagaacacaatgataattaaaaaaaaaaaaaaaaaaattactaaagaatatacacgagcatttcttataaaccagtgaagtacggtccttagaacttgctaatatttgtaatggcaaacatttactcaattttactctcagtgcttcaatgaaaccattctcagtatggaatcaaaattgttcatttatttcttaatatttaatttgatgtaattttcaagagcagtttttctataggaagagcctaatgaaaatgggttatgtagattactggaattacaactatattttcccctctctgtcattagtatttgtctctgggaagctaatgtttaatacattctatgctatcaggaagtttaaattacaaagagcaaacattaggattgggtttacccttttttcagtatcaattatgtaaaagatacagtgatcggcatattaaaccccttgctgttgagtccctaagtacctaaagagcctattaggcagcaaggttgaaaaatcctcgtttgtagctatagcaaacgtagttacattaaaaaaggaaaaaaaaagtagaaaaaagtcagatgagcatataatgtacctcagaacttggagctcccggttaaggacttgttctggcttggcaccttcaggaacatgtttgagaatctcaatctttgggcacaatgaaaagttagaagacaaagtctgacatggaaatttgaggttttataaagatacacattttcaagaaagcataatattaaaagttgggttttcaaaagcacatatggcttatcatacaatccagcagttgagctcctagttcttacctaattgaattgaaaatttgagtccatacaaaaatctgtgcatgaatatttatagttgtttaattcacaattgctgaaaattagacacaaccaagaaatgaacaggtgaatggataaactgtgatacatccacacaattgagtattattcagtgataaaaagaaatgatcagtcaaactaaaaagacatgacaaacctatgaatatgagctgatttgatggactttattaacgacaaagtgaaagaaagccagtttgaaaaaactacatactgtatgattccaactatactgacattctggaaaaggcaaaagatcagtggttgcaaggagctgagggggagatggggacagatgagtaagtgaagcacaaagcattttagggcagtgaaactatttggaataatattgtaatggtggatacattatgcatttgtcgacataaagagtgaaccctaatacagactttagttaatactgtatcattattggttcatcaattttaacacataccacataaatgcaagatgttagtaacagaaactgcatgtgggggggagggtatgtaagagaaatatgtactttctaagtaatttttctgtaaacctaaaactgttctaactgtactgcaaagaaaagcacacaagtacatcctgatggtgttttattcacctttcattcaacaattatttattaaataatatgtgccaggcattgtcctagatagacgctgaggatccagaagttaacaaaataggcagtcttttcttgcatggaccttacacttttagtgggggaggataaacaatgaacattgttgtgataatagtgccaaatggtaggaaggactattaaaaaagagcccagggtaagaggatagagtgatagaagtggtatattctagttagggaagacatgtctgaggagcctgcatttaatcagagatatgaaatgacggaaggaactatgagaatatttcgatgaataggattctaatcaaaagaaacaagtacaacgccccaaagcttgaatgattttggtttgtcaaaaggactgaaggaaggtcaatgtaactaaaacagtgaatgaggggaaaagtggtagaagatgaggctggagagaagaaaccaggtgacagacgaggtcctcaaagattatgaaaagaaatttataatttatgaaatcaactttattccagggttgatggggaaccattagaagattctgaggataggatttctgtgatttccttttttttttttttaaattttattttgttgttgctgttgggaatatacacagtaaaacatacaccaattcaacagtttctacgtgtaccatttagtgacactgatcatattccttgagttgtacaacaatcctcaccttccttttctgaattgttgtcattaacaaaaactcactgctccctaaggttcctatctaatctttcaagttgctgtggtcaatctgatcccatatagatagttcttaaaagagcataatgctcaaggcagaagttttttactagttaagctaaactattaaacaatggttttaagaagactttaggggatgtttttggtttaacatttaaaggttaactcaggacaatagtttcagggcttcatccaacctccatggctccagaagtctggagtgcatgagaatttgaaattctgttctgctttttgggaacacttttgatcaggattcttctatgaaatctttcatcaaaatattcagtaatggtagctgggcaccatccagttcttctggccttctggcaaaggaaatagttgttcatggagggacttagccaaacattccatatcctcctatccctgactctccttcctgtattgttccacgaaaatagggagcaactgtgccttggatggccactcgcaagcttttaagaacccaggcactatgcatcgaacgaggaggtagaacagaagcattaaacatgttattttcatgaatttgagtatcatttgcatgcaggagccaggctaatatctatgtgtcgttccagttttaatatatgtgctgtcaaagtgagcactgatttgctttgttttaaaaggatcttttggcaaccatgtggagaatagattagggatagggagaaggtgaaatggaagcagagagaccaattaggaaattattgtaatagctcaggtgtgagataatatcttgaataacactgttgcagtagagatgctgagaagtggtcagatttgggatatacgttgaaaatggaccagatataatgatgaaaaagataaagggtataagagaaagaaactagtcaatgataacctgaagtttttggcttaaagaaacaggtgaatggtgatgccattcacttagatgggccttctagaggaggaattaatgaaaagttcatttttatctgtataataaacaatgccaaggagtagcttgagttgtaaaacactattttatcacataaataaaaattaaattacttgcctgttgctcaaggtcttcagtgtatttcttaactttttgttctctctctgttgcttctcttacaagctgcttaagatcaataatgctttgattttttttgtcaatatcagtttccaattctttcaacttggtttcatacattctaaaagtataaaggaaacaacttgtgtagacatacaaaacgttttctcccccaatggtttaaaagtcaattcaactaagcatactaaaaataagaatatcttattatactgtttcttctagtagaacattttgctgcatatttatttagctttaacaggtgatggcaaaggataagtatccttagtcaacagatatgccaatcattatagagtatttaggtgttatcgaagattataaaaagatggaacctgaatctaattactataaaggtttaaatttaatatctttttcactcacaaaacaagaaaatagcaaaattcatgaaattctgtattgctgaataattttaggaatatatttaaaaaatggcaaagcttctctctctgttatacacacacacacacacaggacattccagggagagggaaaagaatatgcaaaagcatgggtgagagaaacagcctaggatggggaggtattaagctgacagagaataggaaggggctagactgtgaaaggtcaaaccaaggagatgggaaatttaatttttcataaggctttctgagtgatatgtccattatgttccaaagtatgacataaaattaatatttttcaacattttgtcaaatgtattgaaggaaattaacaatattttaatatatagattatctatggtatacattctaaagactaagtacattattcaaagaattaaaatcacatttagaagagaaatataagaaaaattctgcttctagtaatacagttgaccagttagttaatctgataagctctctactattaaatcttctaagaaatcttgaaacgctggttacatggaaacatgctctcttaaaaacaggactgaggtttccctttaaagaggtattagaaacaaagagggaagtgaaaatcaaatgttagttgatgctatggctaacctggtagcatatgtgtgtgagtatgtcagtctccataaccacaggcttgagttttataatctacaaataggcaaaaaagtgtgattttgggactgcaagagccagggagtgaaaactgacccctgtgtataagctaagatatgggaaaggaatcgtttttaatgaaagggtcatcacaaggtctgacacagaataggtatgaataggtttttttagtcaataacagagcaactataaggatttcagaatgaggaagacctaatgtgtcatgggtcccaaagaaagatctctaaatcccttcactgagctgggtgtataatccccactccagcctttaacattttttggggggttgatctatggaggcttgtggttctcagaataagccttttctccttcaactgatttctacttggacttatgtcttcattaagagggtttactgaaggtctactctgtattcagttacctgtatagctcagattaaaacacataaatgatctaaaatgcaaaatcatctctacttatgttttaaaatatcattatcaccccttgcaagtgtttagacattttataaactcttctcacattgacaatctcttttctagcctaacagagcccttttagaaaaggaaggacagggattatcatatctacttaacagatgagaaaacgtgaatccacagaaggaactgaattacttaaagtcaaagtgagaatgaggtctttgtaagccatggcagctacccgactgaagaaacctaagcaagataggccttttaaaaatatatccagcatgaagtgctagagtctagcatgtacaggtactaagtaaatatttgcagaataaatgaatttcaaagtgactcaaaattctttctgagttcaaacatgcttgtagaaaagaatgaaggaccaactggtatcatttctggctgagaaccactgctgggaaccaagcagacaaaagaacagagacccctcccccactttcatactatcacacttactatttcatttaaccctcatactagccctctgatatatgattattgtttctagtttgcagatggaaaaagtgaggcctagaaggggagaacgaacaaatctgtcttggaagaagtacagcaaaaatgctccttagaagtgacagtggaaaagacttcatctcacttactgtgtacatgttactagaaaggaccagttcctgaagaaggacatcaagcttggtaaaacacagggttagcgaaaaagaggaagaccctcagcgagatatattaacagtggctgcaacaatgcgttcaagcataacaatgattgtgaggatggcgtgggactgggcagtgtttcgttctgttgtacacagggtcactatgagttggaacctactcgacagtacccaacaacaacaacagagcagggaagagtggattctgagtactctaggtatggtgttaggacaaaaacccagagcctggtcacctgggctgtcctctaatctgcctccttagcctttctcttttctcttcagacttggttgacagtggcaagtgcagtacagcaggaccactgtgggacctgcggtagcctcagtgctgaggtcccattctagttttaatgatggtggctgccatctcatcccccatccaggccattcccaacagcaagtaggacagatggaatccttgaagacatcaaaatggaaactgggaatgcgtggacatgaggaactctatgaatacggcaagataaagatgaatttgtctttgaaatggaagtgagcagatgtgctggagaataaagaacacaactccatacagaatggttttaaggttgaagcacatggccagggtcctatcgatctccagctttcaaatatctctgcttaaagttagaaatgagaatgacaccagagcctttaccaactcatcacagtcatcagatgactcatcacagttatcaccaccatcactgtgatgatggtagtgatgaacatctgcatgtttactgcaatctttcaccctttcatagccagagattttagtttcacaggcaggaaagtttcatgaggtggaagaaagcaccagaaagcagaggctaataagacactaatactgttctcaactcaaccatcaggggctacctgaagagaaagttgcccaggatataactccagaagaattgcagcaaagcccagctcaagtatgccacaggctgtgacagaagagttcacttatagaaaatgaacacaatcaagaagttgaggctgtagatggagacaggtaggacctaggagaagttgggcgccatcattccagacacatagttgacaggagcttcatgatgcccattcagctccaacacccatagctctgatggagttctgctctgttccatgccctcccactcaaactagttaaacattttcagaagaaagtttttcaccaatgctaggagaggaaaaaagtattatgttaaaaaaaaaaaaccaaaaacagaacaaaaatgttcatgagaaggaactaaatgaaccaggtcataacatattcctttaaaacaaggatgccagaaatagaactgataaactttatacaagttttaaactatttactcctacctcgtaacaacaattgatttccagctcttgctgtcagcaccttcaagctgtggacccctactttctgcaaattgcaatctcttaccagtctcttctagttgaactgtcatcttctcatttaatatctctaaattattcttggctatccgtaatttctctgcagcctcagtttcctatcattaaaaactaattagtatattatgacaaagcatatgactgttttcatagatgcaatatactcaaaattattattacaaattaaaattaaaaacctggagttctaagtgctgattaaaatttcaatcaaaatgcaatgtttccttcactctaaaatagcaatatggttataataattagaacaagacatcatgtaaatgaggttggaaaaatacattcataagctttttacactagtggttactttgatctgtttttgtcattttgttttctctgtaaaattttaggaataatgggatattattctgtcttcaagcatttaaaagatgcattgttttgactccccaatacctgaaagactatgttcaagtaacagagattattttcactatttaacattcacattcaatgcacagtatcactatggctttgtgatacattcagatactattccaactctgaaattcaatttttgttgttgttgggggccatcgagtccattccgactcatagtgaccctatgcacaacagaaagaaacactgcctggtcctgtaccatccttacaactgttgttatgcttgagctcactgtcgcatccactgtgtcaacccacttcatcttttatgctgaccctataatttgccaagcgtgatgtccttctccagggactgacccctcctgacaacatgtccaaaatatttaagtaccagtctcaccatccttgcttctaaagagcattctggatgtacttcttctaagacagatccattagttttttggcagtccatggtatattcaatattcttcaccaacaccacaattcaaaggcgtcaattcttcttcagtcttccttattcattgcccagctttcacatgcatatgatgcaactgaaaataccatggcttgggtcagatgcaccttcgtcttcaagatgccatctttgcttcttaacactttaaagaggtcctttgcagcagatttacccaatgcaatgcgttgtttgatttcttgactgctgcttccatggctgttgattgtggatccaagtaaaatgaaatccttgataacttcaatcttttaatcttttctccatttatcatgatgttcctcattggtccagttgtgaggatttttgttttcattatattgaggtacaatccatactgaaggctgtggtctttgatcttcattagtaagggcttcaagtcctcttcactttcagcaagcaaggttgtgtcatctgcataacgcaggttgtcaatgagtcttcctccaatcttgatgccccgttcttcttcatatagtccaacttctcggaacatttgttcagcatacggattgaataggtatggtgaaaggatacaaccctgacccacaccgttcctgactttaaaccaatcagtcttcccttgttctgtccaaacaactgcctcttgatcaatgtaaaggttcctcatgagcacaattaagtgttctgaaattcccattcttcacaaatgttatccataatttattatgatccacacagtcaaatgcctttgcatagtcaataaaacataggtaaacatccttctggtattctttgctttcagccaggatccatctgacatcagcaatgatatccctggtttcatgtcctcttctgaaactggcctgaatttctggcagttccctgttgatatactgctgcagccgtttttgaatgatcaccagcaaaatccttcactactgcaactcgaagcttgaatttttttcttcagttctccagttctttcagcttgagaaacgctgagcgtgttcctcccttttggttttctatctccagctctttgcacatgtcattataatactttgtcttctcgagcagctctttgaaaaatatctgtttggttcttttacttcatcatttcttccttttgctttagctgcttgatgttcatgagcaagtttcagagtctccctgacatccatcttggacttttctttctttcacctcttgctttcttcatgtatgatgtccttgatgttattccacaacttgtctggtcttcggtcactagtgttcgatgcatcaaatctattcttcagatggtctctaaattcaggtgggatatactcaaggtcatattttggctctcgtggacttgctctgattttttttcactttcagcttgaacttgcatatgagcaattgatggtctgttccacagtcggcccctggccttgttctgactgatgatattgagcttttccatcatctctttccacagatgtagtctgcgtgattcctgtgtgttccattgggtgaggtccatgtgtataatcgctgtttatgttggtaaaagaaggtatttgcaatgcagaagtcgttggtcttgcaaaattctatcatttgatctccggcattgtttctatcaccaggctgtatttccaactactgatccttctttgtttccaacttttgcattccaatcaccagtaattttcaatgcattttgattgcatgttggatcaatttcagactgcagaagttggtaaaaatcttctatttcatctttggccttagtggttggtgcataaatttgactaatagtcgtattaactggtcttccttgtaggtgtacggacattatcctatcactggcagcgttgtacttcaggatagatcttgaaatttttttttgaaaattaatgcaatgccatttctcttcaatttgtcattcccagcatagtattctatatgattgtccagttcaaaatggccaatatcagctcatttcagctaatgcctaggatatagatctttacatgttccatatcctttttgatggcttccaattttcctagatccatacttcatacattgcacgttcctattattaatggatgtttatagctgtttcttctcattttgagtcgtgccacatcagcaaatgaaggtcccgaaagctttactccatccacgtcattaaggtcaactctactttgagtaggcagctcttccccagtcatcttttgagtgccttccaacttggggggctcatcttccagcactatatcagacaatgttccgctgctattcattaaggtttttaccggctaatgcttttcagaagtagagagccgggttcttcttcctagtctgtcttagtctggaagctcagctaaaacctgtcctccatgggtgaccctgctggtatctggataccggtggcatagcttccagcatcacagcagcacacaagaccccacagtatgacaaactgacagtcaagtgaggagaattacaattattcaatttcaatttaattttctagattatccatataaatagccataccaatttgtctgggtcaagtaatatattttgctattgaaataaaaatgaatcttactgttttttaataaaatactttcacatactccttaccattgttctaagtcacttgcagaaatattaactcatttaaaccccacaacagccttgtgagataggtgtaattatcattcccaattttataggtaagaaaattgagacagagaggggttaagtaacttcccctagttctcatgaccagtaagtaacagagctagtatttgaattcgagcttatactgactcaaaatatattaatttttttattatcaatgtcactcatggtgaaaggatgtaatgatggcagacataaaaatatgacaactaaatctcttaaactctacttgtagacactctcatcaagaatctattttcaatttttccaagatgtattacttagttaatataaaatttaataggtaataaagtcatacttttttaagttctttacgaagtctttcattttcagcaacaattttctctgtgcctttggttttggactcatactgtatactcaactgacgtccaagatgaactttaagtttctccaattcagcctacgtaacaaaaaaatgatacattaacaaagtgaggaaaaaaatgaaagatgatcttgtaaactcataaatcttaattcaaagttgttttagaggccatatttaatatgattagaattaaagtctcttaaatactgagcatctgtatcaaagattttcaaccttgggtacatattagaatgacctgatgatttaaaattaaaaaaaactaatttattaagtaactcagaacacctatgctgggatccaccccaaaacaatctaatcaactgtagaggttaaagcctggacgtgtgtatttttttttaaaaagagccagaggtaattattttatgctgtcagagttatgacaaaataaagataactaagtaaagctattcaataactacgcgtctgcaacaagtttttccacatgtacaacatgtctactgtatccatcaaagccattttatttgttttttaatttttcttatgctttaagtgaaagtttacaaatcaagtcagtctctcatacaaaaatttatatacaccatgctatatgctcctaattgctctccccctaatgagacagcacactccttcccttgactctctattttcctgtacattcagccaggttctgagcccctctgccccttcatctccccttcagacaggagctgcccacacagtctcatgtgtctaccgatctaagaagctcactcttcagcagtatcactttctatcccattgtccagtccaatccctgcttgaagagttggctttgggaatggttcctgtcctgggctaacacaaggtctggggaccatgatctctggagtccttctagtctcaggcggaccattaagtctgggctttttactttggggtctgcatcccactgctctcctgctccctcagggggttctctgttgtgttctttgtcagggcagtcattagttgtagctgggcactatctagttcttctggtctaaggctgatgtagtctctggattatgtgtccctttctgtctcttaggttcataattaccttgtgtctttggtgttcttcattttactttgatccaggtgggttgagactaattgatgcatcttagatcgccgcttgctagcatttaagaccccagatgccactctccaaagtgggatgcagaatgttttaatagattttattatgccaattgacttagatgtcccctgaaaccatgggctccaaaccctcacccctgctacgctagccttccatgcattcagtttattcaggaaacttccttgcttttggtttagtccaggtgtgctgacctctcctatattctgtgttgtcttttctgtcacctcaaatagttcttatctagtacctaattagtgaaaactcctctccctccctccctgcccagtctcgtaaccatcaaagaatattttcttctctgtttaaactatttctccagttattataatagtggtcttatacaatatttgtccttttgcaactgactaatttcactcagcataatgccttccaggttcctccatgttatgaaatgtttcacggattcatcatcgttctttattgatgcgtagtattccattgtgtgactataccataatttatttttccattcatctgttgatggacaccttggttgcttccatctctttgctattgtaaacagtgctgcagtgaacatgggtatgcacatatctgttcgtgtaaaggctcttatttctctaggatatattccaaggagtgggattgctggatcgtatggtggttctatttttagctttttaaggaggcaccaaattgatttccaaagtggttgtaccattttacattcccaccagctgtgtataagtgttccagtctctccacaacctctccaagatttattattttgcaggttctggatcaatgccagccttgctggagtaagatggaatctcactgtagttttgatttgcatttctctaatggctaatgatcgtgagcatttcctcatgtatctgttagctacctgaatgtcttcgttagtgaagtacctgttcatatgctttgcccattttttaattgagtttttgcagtatcatgtagattttagagatccgacactgattggaaatgtcacaactaaaaactttttcccagtctgtaggtaatcttttgagtcttttgatgaagtctttggatgagcataggtgtttgatttttaggagatcctagtaatctagtttctcttccgcattgttagtaatagtttgtacactgtttgtgccatgtattagggctcctagtgctgtccctattttttcttccatgatctttatcgttttagattttctatttaggtttttgatccattttgagttcattttggggcatggtgttaggtatgggtcttgtttcattgctttgcagatggatatccagttatgccagcaccatttgttaaagagactgtcttttccctatgtaactgactttgggtctttgtcaaatatcagctgctcatatggatagatttatgtctggattctcaatgctgttccattggtctacgtatctgttgtggtaccagtaccaggctgttttgactactgtggcagtgtaataggttctaaaatcaggtagagtgaggcctcccactttgtttttctttttcaataatgctttacttatctggggccttgttcccttccatatgaagttggtgatttgtttctccatctcattaaaaaatgtcgttggaattcagatcagaattgcattgtatctatagattgcttttggtagaacagacatttttacaatgttaagtcttcctacccatgagtaaagtaggtctttccacttatgtaggtctcttttggtttcttgcagtagtgtcttgtagttttcattgtataagtcttttacatatctggcaagattcattcctaagtattttatcttcttgggggctactgtaaatggtattgatttggtgatctcttcttcagtgtttttgttggtgtagaggaatccaactgatttttgtatgtttatcttgtatcctgatgctctgctgaactcttctattagtttcagtagttttcttgaggattccttagggttttctgtgtataagatcatgtcgtctgcacatagagatacttttacttcttccttaccaatttggatgccctttatttctttatctcgcctaattgctctgactaggatctccatcacaatgttgaataagagtggtgataaagggcatccttgtctggtttctgacctcaaggggaatgctttcacactctctccatttaggatgatgttggctgttggtcaaagccattttatattgtatgtttaatttttttctaaaaaattaataagacctataatagtaaaacattcccataaaaatgatcacattaaaaaagttaccttcaacttttcattttccagctcgatattagccattttctcactggtcagtattcctgatgcttttttcaactgttcattttctctttggactttttcaactacttttttcattaaaccaatggttttttctaattctgggattgtctttccacttctaccagactatacaaaagaatatgttaatgttttttaatcagatatttcagagaatataatgtaccaacaatagaataagttcattattatattcattcttcttaatttctaacatttcaaggcaaagctcatattatttcaattcatccttagaactatcctgtgacatgggaattataatcctcactttacatataagaaaatcaaatctcagacaatttaatattcctaaacccatgcagttaataagtaacatccaagaacaaaagtgtagtcttgatgtctgattcaaatgaataaacgtaaggatttaaatattctacttagctaatatactctccactataccagagctttctttatatggaataaaaccacaaaagagaaactgtttttaaaagcttatgagctaccaaattgcagtttcaacataacagagtgtaatggattgaattgtgtccccccaaaagatacgttgaaatcctaacccctaaaaaaaaaaaaaaaattttttttttatactacctataaatctggggtctttgaagatgttatcagtaacatgaggtcataccaaggcaaggtagggtggtcctaattcaatctgagtactgtcctcacaaataagaaaacagacagagagagacacacagaaagaaagatggccatggaaagatgtatctacaagtcaagaagtgccaagaaacacctgggcctaccagaagatgggagagacaggggaagatcttcacctcgctcagacagagagaacatggccctgtccatgccctaaatttggtcttatagcctccagaaatatgaaacaataatttctgttgtttaaagtcacccagttcatggtattttcttacggcagccctaggaaattaacacacagaggtgattttctctaacaatacccagtgtgtttagaaattcagtatctacccaaaaaaaatagaagagatgcctgaagttaaaaaaacaaaaaacctaccataaagatatcaacaggtatgagtcaccaacttataactgtttataatttgaaatagagacaacagacggtaaaatagtctgcttttttttttttttgcattttaatcagtatttaaatactttacaataaataatcccgaaatataaagttttacataatttaaacatacttccatgattaacttatagaaaaggtcaaattaacacagagctattttaaatatatgaaacaaaggttactgaccatcaggaagttatttatcctgaattattttccaatgatactcaatattcaccaagttcatcatatttttaacattagtacctgaatgagtacttccatcaccactcacacatgaggtttacagagacttaaatctttggccttggcctcataagcagcatttattaattgtataaactgaatacaaaataagatgagaagaaaaagaacacaaagcaaaacaaacaaacaaacaaaaaatggaaaacacatttacagagcattgtaccaagttggtgcaactgatatcataaaaaagagttagaaaatgttagaattgggccaaggatcagttagtagttaccacaatcaaaagaagaaaagattcatggaagttaaaagtttttaagatgtggtaggatatacaatttaaagagagatgatatggagtccaagtgaaataaaaagcatagaagatgtgacagatgagaaaataaattaacttagaacacagaagaaagcttaatgatatttcatattgaagacacagcagaataaaaagtgaatcccagaggcactagtaatagcacatctttggtgttttggcacatctcaactttttctttcatttctggtttatcacttctgaaactgaaacaaatgtatagcatattttcacatactcacccctctaacatggccaagtttccgctcaacttctactttttctttcttaagaaattcacacatttccttcaaatctctcacttgattctaaggggtaaaagcaaatgcataattaacatagcttagccattgatgggagaaagatgtggcagtctgcttctatagagctctacaaccttggaaactatggggttgctcagagtcggaatggactccgtagcaatgggtttggtttggtttctttttatcgccattgaaaaggaagggcaaaacttttattgctgctgtgccccgtacctacaagagtgcccaacaaaaagtaggccctcaataaataattgttaaaggaacaaatgtataaagtttaacactataataatatgcatagcagttttctacctctttgcttcataagataatataataaataagtggaggaaaagacaattttcaggcattagatttcctaactatagtaaaaaacattaaatttacctttaatcttggcaaatctttatttgcttgttcaagctgaaattttagttcaatattttcagacgacaacttcaagttttccctctgaagctcctgttctctttggcaatgatcatcagaccctatttctgaagtcttcaggaaaatgaagttaggaatgtttttaaggctttataaataaaggccacataatatatactggataagaaatcagtattccaaaaggaaagctttttttttttaacaatttattttatttttgttgttgttgttgaggatatacacagcagaataatcaccaattcaacaatttctacatatacaatttctaacaaccatctgtaagtttgtcctactgtggtgatttacgtgttgctgtgatgctggaagctatgctaccagtatttcaccagcagggtcacccatggtggacaagtttcagtggagcttccagactaagacagactaggaagaaggacctgacaatctactttgaccagtgaaaaccttttgagtactagcagactaggcggtgttttgttctgttgtacatagggttgctgtgagtcaaaatcaccttgatggcacctaacaacaatacgtacaattcagcgacatcgattacgttcttcaatttgtgcaaacattttcaccctccttttctgagttgttctcctctgttagcattaactcactgcctcctaagtttcctagctaatctttcaagttgctgttgccaatttgatgccatatagacagaccttaaaagagcacactgcccaatgcaggcattcttggctcccagaaaaaaacccagtgccgtcgagttgattccgactcagagtgaccctataggacagagtagaactgccccatagagtttccaaggagcgcctggtggatttaaactgccgaccctttggttagcagccatagcacttaaccactacgccaccagggtttcttggctagttaagctaaacaactggtcttaagaagacttcagaggatatttttggtttaaggtttaagaataaagattattttatggcaagtttcaggggttccttcagcctccatggctccagaaaatctggattccataagaatttgaaatcctattctgcatcttccctttttaatcaaagattgtcctgtagaatctttgaccaaaatattcactaatggtagcccggtaccatccagttctggtctcatggcaaaagaggcaaaagggaactttcttccttaaaggaaaatgagaaaactggacagctctagagaaaaacaaccaaaaataggtaagttggaatatgaaacttgcaagagtgtgtaggttgttttaattaaaatagaaagcagagtcaagtataactttataacctccacacatataacacctccatatatactctcataatggctaaactaatttacaacagctttatcaaaactaatttatggtatgattgttatcgagccatcagaaagaactgtctcaatttgttcctcctttggaaagctcctcctcattccctgagctaaagcaatcactcataatatatttacatttctcctggcaaaatccactttgggttattatttatgtacattttctcttctcattataaacaaaagttatttgaaagagaaatgtgtgtttgattaccttttgctacaaagtaggaagaatatcatctacctcataggattgttttgagcatcacacaaagtaagtttgtagaagtatttagaacagctttggtttcttctcccccacccctttttctctctgctggcttgatagctataaagtcaataactccacagatcctacagttgttaaaatataaaattacataaatatatttatcatacaaggctccataaaactttttttaaatattttatatttctcaagtattaggttttaggtaaaaaagtaaagaaatatttattttttttagataaaatgtagtaaaagtaaaaaattagaaaacagaacataggttatgtaaagaaattctaggcagacatttgattctgacctgagggtatgtatacaagaacactggcagaaagttcccatttgtccacctgaattctatttgtttcagggaatgtgttcgtgtgtacatacgtaggggctagaaaaagaagacagtagacgtttttgttgacgtctataaatcactttttataaatcactagaatgtatccccactttattctctgtcagacaacccaagtatacaccccagtgctaccactattgattaacactagaaaatcatgccatctacaaggtcctcaggttttgcatcttatgaatgaaggcagtacatcagataattcccggtccctgagctcttgtgtctcccttacctcctctctgttgtctgtggtagctttttagccaatcagtgatagtgcctatgagcaccactgattaacagatataaattgactaaataccactcacagaagagaggaattctacatgataaagatatcacatgagggtatttttaatagttttccacactaaaatatggatgtaattatttatgtaaatgaatatggatcattttcccctgattctcagggaataaaacttaaaataattagttgagattttacaaatttctggagaataagtttcaatgaaaatataccatgaaagtaatataaacagaactcttgtataatgaacttcatggtatttctaaattgttttacagaagagcattccattataagtcagatactgctagaaatcaaattcttacttgatgagagttagagatattacagtcaaggtttcaaattctcaattactcattaacaaatgaagaaaaagaagtattatgaacctggatacagatatgaagtaagaagttaagtcattttcatccatatttttttaacatttagattttagttgatactttgaggacttaggcaactagattatctaggtggaaaggataaagggaaaaaaagataaatgctttttgattttcatcagaagcaaatttgtcttctggctgtaatatgaactgaccaagtagtgtactcatagaaagtaagttcataaactgtagagttagacctgaatttaaagcctggttctgtatcttcatgatcactaaggaggtaactcgcttttccaagtcttacatgaaaacagaaataatgttgttgttattattgttgtcaggtgccatttagtcagttctgactcatagtgaccctatgtataacagaatgaaacacttcccagtcccgtgccttcctcacaatcgttatgtttgagaccactgttgaagccactgtatcaattcatctagttgagggtcttcctctttttcactaaccctctactttaccaagcatgatgtccttctccagggactggtctctctgataacatgtccaaagtatgtaagatggaagtcttgccatcctcgcttctaaggagcattctggctatattttttccaagatggacttgttcattcttttggaagtccatggtacactcaatatacttcgcctacaccataattcaaagacatcaattgttctttggtcttccttattcattgttcagctttcacaagcgtatgaggtgactgaaaacaccatggcttgggtcaggtgcaccttagttctcaaagtgacacctttgctttttaacattctcaagaggtcttttgcagcagatttgcccaatgcgatgcattgtttgatttcttgactgctgcttccattggcgttgactgtgaatccaagtaaaatgaaatccttgccaatatcagtattttctccatttatcatgatgttgctaattaccggtccagttgtgaggatttttgttttctttatgttgaggtgtaatccatattgaaggttgtagtcttttaacttcattagtaagtgcttcaagttgtcatcacttttagccaacaaggttgtatcacctgcatatcgcaggttgttactgactttccctccaatcttgatgccacgttcttctttatatagtccagcttctcggattatttgctcagcatacagattgaataagtatggtgaaaggatacaaccctgacacacatctctcctgattttaaaccaggcagtatcccattgttctgcctgaacgactgtctcttggtctatggaagaagtatagccagaatgctccttagaagcgaggatggagagattttgactcaagtactttggacatgttatcaggagggaccagtccttggagaagggcatcatgaatttactgcattaatattaatgagagggatataatgttttggccagaaaagatttcacttttatacattaaaaatagaaaaaggaaaaaaaaaaagaaataaagatgcacacttaccgagggcttagaatatacatcctttgacaattgtttttctaaagcatgaagtttttcttggaggtatctattttgtaagcgtaagtcttctatcacagaatctcgaggaagagcttggtgggtcctatgaacaaacaaccacatactctttacaatacaaacttcagctattcactgttttcctatattaaaatataggaaggaaaggaggaaaatgcaatgaatttattaacattgtatttattttaaactttacaaaaattttaaacatttttaaaaaataagtcaggacgcaactaatattataaagtcatcctctacagaggattcactgcagggctcctttaaactatgaatttaaaaagtgtatcctgatttacagaaatacatgaacattttaaaagaacatacatctatgtgcatggaaccacacagctagctgaattaaaatattcactagttttaaagcattatatatttcatagtatctatgtccttctgaagacgttcaaaaatcttaaaagatctcagaggagcaagtcaagaaaggggctgtatagagttgtttataaactcctgtgctcactcttgagctgcacacacatggctaggaccctaatcagaacaccaaagactctgagaagtgaaccaacagactgaagaccaccaggtaccagactggcaactaggagatgcaaaggcaggacagacctaaatagcactgtaaagcctttgaaaatggaactgatataggaaccacagctcaaaacaaaaaaccaaaaaaataggttggaacttgcaatctgaacataactggatcaaatgtctgctaaaacaaaaaaatgtatatttaatacaggattttaacaagacacagggtctcataatagtcaagttcaacaacacaatacaaaattatgtggcaaacaaagaacgaggaatatcccagttcacatgggaaaagacaatcaacagaatcgaatgctgagataatacagatgttgaaattatctgacaaaaacttttaaatgactattatacaaatactccaaaaattaaacccaaacaccactgaaacaatggaaaaatataaagtctcagcaaagaaataaaagatataaaaaagaaacaaatagaaattttagaactgaagaatataacaaatatactagataggctcaatagcagattggagatgggctcaagagaagagtacagtgacagaggcaagggacaagaaaaagcaaggcaagacaagacagatcaatagaaattatccagggtaaacaatacaggggaaaagaaagacaaaatgaacagggctttgtacacggggagaagtaacaaaaggtttgatatgagtgtcatgaggtgtactatacgattctagatatgaccttctcaaaaggacagaattacagtgatggaaaactatctctgtgcaaagtccacaggtctgtacaccaaatgagaaaattcaactctaccatttgataatttcaaaaataaaattaacaacaacaaaagaaatgacacggagtctggattggaaaacagagaagggaaataaaagagagaagagagactaagaaatacgggataaacttagagctgacaagaaaagtaagaaattcatggtggtgcagcagctaaagcgcttttcaggacaacctgagctctacagcaggttatctgtaaaacggagaaacgggtcctcaggggtaagagcgagattttattagaaaagaattcagatccagattcaatcctgacagagccctcaatttccatgaaggtattcagcttcccaggaagtatggcatacagtacctaaagcatatttaaatttcaaaggataatatgaccttagctaaactgtaatacccattcctgatgagaccgtcacagtaaggaaaattacaggtcaaccattctcatgaacacagatgcaaatactctaaacaaactaatcgtaaaccaagtccaacaataatataaaaagtataatacatcataatccaatggaatttattccaggaattcaagcctggttcaattcaatacttataataacaacataacactacatggaattatctcattgtggttttactttgtatttcactaataattaatgatatcaagccactttttctatatttcttgaccatttgagtattttatttcacaaaataccttttcatttgcttggctctattgtttttcttttgtttctttctgttgggttgtctttcttttgtttctttctgttgggttgtcttttcttgttgatagaattttttacacaatctcaatacgagccctctgtgtatattaattgtaaatatcttctactgctctgtggttgtctttttactcttaatatttttgtggctagatgttctttcttttgatacagtacaatttatcagtgtttttctggataatgctttttatatcctatttaagaaatctttagtgttttctattttcacatttaaatctggagttaacctgaattgttgttttattagcatgaagtaggtgtttaatttcacgtctagtccccccaatatggaaattcaattggtctagcacaaattagggaaaagatcattctttccctactgctgcataatgctacctaccattgtgtaaattaaatatccatattagaatgggtctgttttctaggctctgttctgtttccctggtctatttgtctatcctggtgccaataccacaccgtcttgattattgtagctttaagcgttgctatcaaaggagggaaagtcttccaacttcgttctttaagattttcatggctgttttcagtacttagtattttcatataaattttagaatcagtttgtcaatgtctactaccaaacacctgcttgcattacgattgtgattgcatggaatacgtaaatttatctgggaaggactgttacctttacaatttcataaagttaaaaaaaaactggcgaaattaacctatggtgtaagaaggttggacagtgattaacttcggagaagggacagagagaatcgggaatgtggagaaattccagggtgcttggaatattttatttgttcacttaaagtggtcacagacatgtccactaggtgctaaataatcatgttgtactcagcatatgtatgcttttctgaataataatatactccaataaaaagggtttacaaaaaaagaaatgaaactctgagtacatcatcaaagactcaaatacagaaagaacggctgggaaaatctagctgaatagctgagagatctagaaattttaattgctgcaagttcaaaacgaggtggccaaaaaaaaaaaaaaagcatactgtgttaataaaatcatatttactagcctaagggtggaaaattatcctgatagtatactataccctgatcaagtcagatctagagatctagaacacaacactcaactcagggaaccatattttaaagagacactaataagcaaagcacattaaactcattttaaaaatactaatatgagctaattgttacagtcaaccaattattcttcattataagaaattttttttttcttataagtgcatagcacattccatgtaaaagcttacctcatataagttatgtcactttctaagtcaagatttctcttttttaattcttccaactctttttctgactccaaagctcgtactcccataacttgatcaacagtcatgccagttgtttttagtttcctctgcaaagtaagtttctctttatcagctctgtaggatttaatatgtaatcatgaaaaacagacaattcactgtttggcttgttcaattattaatctgtggcttactcattaccagaccaatgtatgacaattagatcattctgtatcctctatgagctaacttatttcaaaaccacaggaagctccaattacaattgttcaaatatatttaaaacatacaaatataagaacataaagtgaatcacaggcaataaggagaagttaaaattagaaacattctcatattatgaagtatgacaactatacaacttcagggtaaatacaagaagactacacataattaattttacaattaagtttaaactcacttggcaaaaagatcctttaaagtatttagctgctttgttagagtatagacttctccctctttctcttttaatttgtttcgaattccctctactttgctttgccattttttaccttcttcccacctaattaattcctctctagcactctgtagcaataacaaaggaaaaaaaaaattaacaatattattttttaattacattttgaaatttgtttatcaattatagtttacattgaacaaggtaaatgaatgcttcctagaaaatacataagtaggttcattttgctatgtaaacctcgagaatttttaggtacgccagctattagcaaaaatgcccttcattctaagtacgctttattctataacttggtagataaaatcctaggggatggtttaaactagtgccaacacccttaaggagtctttaaatattctaatagacagtcaaaactaaagttaagcttcaaagaatctatatttacaaacgaccaacacaattttgtcaccccatgacaatctctagcatcagagccccttttcaagtcttcaatgaatattaattacttcattcattcaacagatatttatttagtgctaatcatgcctggtactaatctagcactaggaagagaagctagacaaaaatactactgtcttcatgaattttatagtctagtttatgttggtttgtcaggtaattgaggggaagggcacaaaacacaaacaataaacaagaaaaataaaaaatacctacaggtacctcctgcttttcgaaagttcgctttattacacttcacttttacaaaagacctacattagtacttgtttttgctaatcaaaagaaattccaagaggattttcagttttaggaaaaaggcaaaaagcagaaatacggttcagcctttgctttgcagagagtccttaaataggcaccacgcaccctgagcagtgagaatggcatcactaagctacttccctggaaactatactcagcattcctgcttttactatatgtcagtgttattttaggttttatatgttatttggtatgattggataggttattttttgagcctgagaatgctcaaaaaattttcccatataaatcaatggtaattgcttcttcattttatttcattacagaaggtttcataggaattttctactttcaggtagtgagggaaactagtattctgtagtatattaaaaagagccctggtggtgcagtgttaagtgctcggctgctagccgaaaagtcagcagttcaaatccaacagtggctctcctgaagatgtgacagtctgttccagtaaagacttacagccttgaaaaccctatggggcagtactactcagccctgtagtgtcactatgaacatgaattgactcaagggcaatgggtagtatactaactgggaataagtgctaccaggaaaaaaaaaaaaaagctaggaagggaattagggagcttcagggtagatgtaatggtttgttataattgagataaagtggccaaggaaagcctatataaggcaaaacagtcctatgttctaaacaactttcaaacattctactggatgttgggcaaatctgctgcaaaatactctttaaggtgttaaaaagcaaagatgtcaccttgaagactaaggtgtgcctgacccaagccatggtgtctttaattgcctcatatcatgcgaaagctggacaatgaataaggaaggctgagggagaattgacgcctttgaattatggtgttggcgaagagtgttgaatacaccatggactgccaaaagaatgaacaaatctgttttggaagaagtataaccagaatgcttagaagcaaggacggcgagactatgtctcatttggacatgttatcaggagggatcagtccctgaagaaggacattatgcttggtaaagtaaaagatcatcaaaaaagaggaagacctttgatgagatggattgacagtggctgcaacaatgggctcaagcataaaaatgactgtgaggatgacagcaggaccaggcagtgttctgtttgtgtacacagggtcactatgggttgaaactgactcaacggtacctaacaacaacaactggacatttatatactagttgaaattatctaagctaagaacttacctccattctaaatatgaacatcttgcaattttaaaattcttttaatacacatcgtgaattttctaggaatacaatggccatatacaaatccagggaagactgtagactccctcttgctgaaaactgcatcaacaactgcttatcactttagaaatcaaattacaaatggcgatgccattgtgacttatgagctgcctactaatgcatttgtatcagtctgcaattaatgctaagtaaaggtgtacaagactattttcatcacgttttccactgcagccatgccaggacacttacttactgaaacataaataatatattattttgttgtaagttattttcctttagatttcatttaagacatttatattgacattttggaaagcatgtatacaggttgtttatattaacaatgaatttcactcagaatagtaaagggggcattatgaaacactgtatttatcataaaaggggatgtaggattgacagggttgatagccatggtttaaagtcaaatttccaacaaacttatgttgccttaccaaaattatcaattccaacactgcccaattttttacctcatttatttagtttggctaaccagtaccttttaaaaaaaaaaaaaaacttaaaaacttcagtaaatgtttgatagctattagcatcttttttttttttctgaaatatatacaaggctttatttgtactgccagaaatgtaaatattacttgagggcaaaaggtatataagttaataattctgaagcatggagcactttgttggaactgggcaattctatcctacctgaaaataccttctgaagtaaaagtgaggggaaacaaggctggcaggatttaaagataaacagaaaaacaacaaaggcaaatgtcaccaagggtctgttctaactggggatcagaggtaacaagggagagaacaggatggagagagaagttctcttttcatattttcttgtgttgacagcctcctatgtatacatttcataataatataattgcattttaaaatatccatttattcaagacatactgagcatctattcatgtcagggactgttctaggtgctagagatacaataaagagcaaaacaggcaaattccctgccatcagagcttacagcctagagaggagaaacaaaagatgaacacagagttaagtaaatatgttgtatgtcagatggcaataaattctatggagaaaagcagcataaggagaataggaatgcaaggcataggggtgcgttttgttatattattataattaggttacaaacaccgctaatagagcaaaaaggtgttgaaatttccaaacatccaatatgaatgtactcttatgaaaacattcataaattagaaacgcctgtcactgtgaatctaacagaatattttcattacagtccaacatagggatccatattgagatatgaatttcaatatatggtgttggtcactgtgtttttgttctttttctagttatttttaataataacattattatttctattttaaggaagaataagctgatgcacagaggttaggagtccaggcaaagatcacaaggctattctgatagcaagcaggttagaaactggtgtgcaatgatcagcactattcccaagcagggaggcagtgaaggagggatacgtacattttgatcttgtggttttcaccagcagagcttctgatagcaagtatgttatagtttcatgcataaaaatacattttaatcaaatgtatactgacacttacgaattttcatagggagagtatttttttggagtatattaagacttcttaattctattacctattttctgttcgatgccattaaaaacacttcgttctctaattaatgaaattattttatagacattgaatattttctgggtaaattttacaataaaagtttttcctaaccatagctcttccactgtgattttctttggggtcaaatattgacataaaaagccatttttctcaggtcatttttggtattttcaatattagcaacaacatagaagtgttcagtttatcattcacagcaaattcaatgacatgcattttagcctaaaatttttaggttttctttgggttgattatttctatcactaatttttattacaaaagtttactaggtaaccagtaaaaaaatgttaagcaatgtctcccacattataaaatcaatctattgagaaaagttggttattgattattactgcaaatattgaatatatttcaattaactttgtttaccctgaaataacattctagtctgctgaaggataaagtgacacatttgggtcgaagtaaagggcttaacatgttcagctttctttcccgaaggccagaatcaccaacttaggtaaaaaaaattacactgaatgagaagtgatagatacataggtgtgaagggattctggagttattataaaatcaggaagatgaatggacatgatgcagtaattttcaattaagagagttacaaatttctcctcgagtatacactcctaaaggatagaaacatgtcttagactcccctacattacccagtaccatttacagatcctcaaattaatacaatatattatctatgcatcagccagccagaaggctccagagaagggaggatggcaagactctgtcttacatactttggacatattatcaggagggactacttcctagagaaggacactgtgcttggtaaagtagagggtcagtgaatgagaggagaccctaaacaagatggaatgacacagtggctgcaatgatgggctcaaccatagcaacgactgtgaggatggcacaggactgggcagtgttttgttctgtcgtacataagatcattatgagttggaaccgacttgatgtcacctaacaacaacaacatcaccgttttaaacatattaatcagtataatgcttcacgtaccttttctttcatgggttttacctctacctcatccacctttctctcaagttggctttctagctttttaattttcttttggagttcttcaattaaactctgtttattatccagcagatgtttgccctgaaaaaatagatgtatctttacattttagaaattaaaaaaaaaaaaaaaatcaaacgaaaatacaattaacattccaattgcagaagctttccgaggctactgttaaccacactttctaaatgatagtattaatatataaggataaaatggtaccagtttcagcattttaatgatataaaaatacaacagagttcacagatgaagtcagtgaaactaatcaaagtgatgtaagagccagtttcagcaaacattacagattaaaaaaaggaataaagtataacctataaattgtatatcaaaggcattatcaatataaaattacctgtaatccactggttagtcttttaatttgccttttcagctcgtcattctcttgatcgattccatctttctctcgaagtattttattataggctttttgttttttttgcagttcattgtttaagtcattcaaattatcagctagtgagttttctctgttcttacttgttttaagagcttctttcaattttaaaagattttcacttaaatcttcaatttgtgactaagcaagagagaaaaggttagtatttatgaatcttcatcaagtatcaatgataaaagcaataaaaaccagaaagtatatattattaatatttgttaaaaagcaaattttaatccaaactttttaaagtacacaattaaaaaaaaaaacccaagctacatatatttttccatgttcacatccactgaaccaaggctaccttgagaaaaaaaaaatacaaacgctaccctcaatgaaacccagaaacaaaattttatcaagtaaacaaatgttttattaaggatgaattaattaattaaaggaataagtacgtatccatgcatgatgcaatgttttaagcactgaagtataatgtcttaaaacagtataaaatataatctctgacttcaagtagtttaatctatttagtaaagacaaaacctaaaagaataataccagatagtatagtatacatacatataccaccacttgtctgtcagtttatcttactgtggtagcttgcatgttgctacgatgctggaagctatacctctggtatttcaaataccagcagggtcacccatggtgaacaggtgtcagcagagaatccaaactaaggcaaattagaaagaagggcttggcgatctacttctaaaaaaaatcgaccactgaaaaattatggataacagcaaaacactgtctacagtgctagaagatgggcccctcaggtaggaagacatccaaaataaaactggggaagagctgcctcctcaaagttgaccttaatgacgtggatgaagtcaagctttcgggaccttaatttgctgatatggcaaaactcaaaacgagaacagctgaaaacatccattaaaaaacttgagcatggaatgcacaaagaatgaatctaggaaaactagaagccatcaaaaatgaaatggaatgattaaagatcaatatcctaggtactagtgagctgaaatgaactggtattgaccattctgaatagaacaatcatattgtctactatgctgggaatgacaaaatgaaaaggaacagagtcacattccccataaaaaagaatatttcaagatctaccctgaagttaagtgatacgataatatccatacacctataaggaagaccaattaatattatattactcaaatttatgcaccaaacactaacaccaaagatgaggtaattgaagatttttaccaacaggggccaagcacagaatagaccatcagttgttcacatgcaagttcaagttgaagctgaagaaaattaaaataagtccatgagagccaaagtacacctttgagtacaacccatctgaatttagaggccatctccggaacagatttgacacattgaacactaaggaacgaagaccagatgagctgtgggatgacatcacacatgaaaaaagcaaaaggtcattaaaaagataggaaagaaagaaaaagccaaagtgaatgtcagaagagactcaggaatatgctcttgagcccatttttgcaacaacaactactaatactgcacacacgtaaacttttgctaaagaccatcaaaagtggttgcagcagtacagaaattcaagccagattcagaagaggacatggcatgagtgatatcactgctgatgtcagatggatcttggctgaaagcagagaacaccaggaaaatgttcacctgtattttactgagtatgcaaaggcattcaactgtgtggatcataacaaattatggataacatctcgaagaatgggatttctagaacacttaattgtgctcactcgaaacttgtacatggaccaagaggcagtctttacaagagaacatggggatactgcattgtttaaaatcaggaaaggtgtgcgtcagggttgcatcctttcaccatacttattcaacgtgtaagctgagcaaataatccgagaagctggactacaggaggaagtacatagctttgggattggagggctcatgaacaacctgtgatatgcagatgacacaacgctgcttgaggtaagtgaagaggacttgaagcacttatagatgaagatcaaagacttacatctccatatggcttacatctccatatggctttacaacataaagaaaacaaaaatcctcacaactgggcaataagcaacatgaagataaaaggagaaaatattgaagttgtcagggttttccttttatttggatccacaatgaacgaccatggaggcagcaatcaagaaatcaaataatgtattgcattgaacaaatctgctgcaaaagacctcttgaaagtgttgaaaaacaaagatgtcaccttgaggactaagatgcatctaactcaaaccttggtatttttaattgcctcatatccatgagaaagttggacaatgaataaagaagaccaaagaagaagtgatgcctttgaattatggtttgggcaaaaattactgaatataccatggactgacagaaaaacgaacaaatttgtcttggaagttgtacagccagaatgctctttacaagtgaggatggtgagatttcacctcacttactttgaacaaattatcaggagggaccagttcctggagaaggacatcatgcttggtaaagtagagggtcagcaaaaaagaggaagatcctcaatgagaaggattgacacagtggctgcaaaaatgggctcaaacatagcaacaatcgtgaggtggcacaggactaggtagcattttgttctgttatacagtgttgctgagtcggaactgactcaatggcatataacaactttatagaagccactggaaaggagtttctagctgctctacatagtgaagtgacagaaataccagctggcatttcatgcaagttttattaaataaactattcatgtcaaattgactatgcaaaggcatttgactgtgtggatcataacaaattacggataacgttacgaagaatgggaattcttaattaagaacacttaattgtgctcgtgaggaacttgtacataggtcaagacatagttgttcaaacagaaccagagggtactgtgtggtttaaagtcaggaaaggtgtgcatcagggttttatgctttcaccacacctattcagtctgtatgctgagcaaacaatctgagaacctggactgtatgaagaagaatggggcatcaggattggaggaagactcattaacaacctgtgttatgcagatgacacaaccttgcttgctgaaagtgaacgggacttgaagcacttactggtgaagatcaaagaccacagccttcagcatggattacacctgaacataaagaaaacggaaatcctcacaactggaccagtacgtaacattatgataaacagggaaaagattgaagtcaaggatttcattttacttggatccacaatcaacacccacagaagctgaagtcaagaaatcaaaagacacatggcaccgggcaaatctgctgcaaaagacctctttaaagtgttgaaaagcaaagatactaccttgaaagctaaggtgggtctgacctaagccatggggttttcaattgcctcctatgcatgtgaaagctgaacaataagtaaggatgaatgaagaattattgacacctttgaattgtggtgttgtagaataatattaaaaataccatggactcccaaaagaacgaacaaatctgtcttggaagaagtacaacctgaatgctccttagaagcaaggatggtgagactttgtctcacgcactttggacatattgtcaggagggatcagtccctggagaaggacaccatggttgaaaatagagggtcagagaaaacagaaggagaccctcaatgacatggactgacacaatggctaccacaatgggcttaggcataacaacgactgtgaggatggtgcaggaccaggcaatgactcgttctgcagtgcattgggtcgccatgtgttggaatggacttcgcggcaatgggtttggtttttttggtaatgtacttcgaaggaaaagaagctgttttagaaaagtcagaaaaggctgtgaagaaaaggatttgaagaattcagagaagccacttcaggctaagaaaaaggtaaatacaaggcataaacaaaggtctattcttgtttatattttttttatttaatggatattttattgtcaactatgcctataaccattatagatacaatagtgttgttgctaggtgctgtcgagtcaattttgactcagagcaaccccacgtgacagagtagaactgtcccatacggctttctagattcgattctttaggggagcagatcggtaggtctttctccgactgagccactgggtggttgaactggcagcctttcggttagcggacaagcccttaaccattacactaccgggctccttttacaggtacaatcaaactaaaaacccacagccatggagttctttcgactcacaggaggcttaaaaattctgagtaaaatccaattcctactctccaagcatttatagtttaatggtggcgaagaacatgcacacataaaccaagagactgaattgaaattacaaacaaaacacataaaaattagatttttttcattttacttagaaaatgctatctaaaactttgtgcaaagaaatttgaaaatcatgatgaaatatatatgttttggaaaaaaagcttaaatcaccaaacttaatgatgaggtaaaaaaaatatgttgtcaataaataaataacttttacaaagtcttcagtgcctggtagcaatatggattaaatgttttaaggaccataggattttcataacgtattttaggggaaaaaataatttatattatgaactagcaaatgctagacagaaaattcccacaacacaaaagaaataaaacaaaaaatctacacacctatcttatttataacataaaagtcaaaatcgtaaatagaatgtttcttcaacgtaattttacttggaaaagtagctcataatggactatcctttcctcatcactacttaataatacaatgatgtgtactgattattcaaaaatgtgtatgtatttgtatatatttatccatcaaataattcattagactaaattccactatcaaaattactacgcatcaaaatgaattgtcttccaaggggaattgtcaggaatttcatgttacggtgatatgtgtgttgatgttcacctttagctccctagtatgtcgatcaacaatttgttgaacgttgagatttgcctctttctgagaagttgcagaaataatacgttcttcagctgctgctgtcatctctgcccgaagttccaaaagtgctctactaagtgcctaaaaatttcaacgtataaattcttttagaaaaattgatattttctgaaaaatacacatataaaaacaaacaagctttattactttatactattttcctaaaataccatgtgtttaattaaacctaatttgcaaactaactttttcaaattccttctaaactggctatgagaattcaaaatcttgacaataatgactttgaaaattcagcattaaatcaaacaatttctattagaaaaacttggcatggtttgtcttcaaatattcaagtttagttatttatctaaatccttccatttgaaatcaatagaagtaaacaaggaaaattatatgattggaaaaggtgtaaaattcaccaataattttttaagctggcataaaaaacagtagcaccttttataacaatctgagcacataaaatctggtataaatgaagaaatctaacaaatcagatcatctactggccaacttcttcccacaagatcatgtctgtgactcacttctttattctcttcctcactactgttgttgttagctgcagtagagtgggccccagactcatgacgaccccgctcaaagcaggacgaaatgcttcctagtcctgtgtcatccccatgatcagttgtagactggaccattgtgagccacaggattttcactggctgattttcagaagtagatcaccaggcctttctctctagtcttaatttgggagctctgctgaaacctgctcagcatcacatcaacatggaagccgccaccgacagacaggtgggggctgcacatgaggtgcagtggccaggaattggacccaggtctcccatactgaaggcaaaaattttagcactgaactattagtacaactccttcttaatcctccaaattattcgaaatagtataccaccagtaactatagtttaaaatcccagtagaaaagcagagaaaataatgtgattaagattcccctgcatttcctacagataacccacaaatcaaatgaacggcaaacaatataaaaatgacaattgggcatatgaatttataaaaaacaatcaataaatctacttaaaagtattatctggaaagaccctgtttaacagcattagctaaggctcatgctttttatcacaacagatagatttatattatcatcttgtacaaatttatctaaaagcaatctgttgttgtgtgtcatcaagttgattccaattcatagccattccatagtacagggtagaactgctccctaggatttcctaggctataatctttatgggatcagatcatcacgtcttttctccctcagagccactggtgggttcgaactacaaactttttgattagcagccaagcgtttaaccattacaccaccagggttccctataaaagcaatttaccacacatttttcctacaggttgataattttctgttgttacttactttctgttgcttctctttcaaggctaattgattctttagtcgttctactagatttctcatcatagttgtgggagctctagaatttgcttctttttgagcctgaatttcagattttaaactctgtgattccttttgtgactgggccagaagacaccttaaatcttccacttctgctttcactttttttagttcatctgcatggttttcttggagtctaatataagcaagcatatgtatttagtagagtggcaattaatactcttttgattgatacaaattatacaaagaacaaatgatcagtcctaagaatccttacaatctaaagtcttgttgtagacatcaaaattaaaaaaaaaacaattctttattccacttaacttctcttaagcttagcataaaatagacgttttttcgtctcctatttttgataatgatcacattgtgttactttgtggctctagtcacataatatagagaatgaacaaaacagtactttaagcattattattccaattaagatatgacttcttcctctacatcaaggtttctcaacaatagcactattgacatttttgacggagtaacgctttgttattagaggccatccaatgcattataggatgtatagcagcatccctagcctctatccactaaaacaccagtagcgccccccagtgacaatcaaaaatgtttccaaactaccgaatgtcctctggagggcaaattacccatagccaagaaccattattctatattgacatgttgtgaaggcaggctataaactttcacagaaatcatgtgcattattaatttataatgtcaatagacagggatactatcacttcttagttattcaattaatccctattgctcgttaagcattattaagtctgaaaaactgaactgcgcacacacacagtgcatcagtaagatcatcaatatggagattcaaatattaaactttgactaattaagagaagattgttttgtcatgaacaaatgttacactttctgggacttgttacttacagtgaaaaactgaaatctaactttaaataatcatccaattgtgaaaacaatcaggttttactgaagaaatcaaactgatatatagtttcctaagatatattaaaataggtacaacaatgtgaatacagagaataaaagtataattttaagggttaaataacactgtaaggtataaaacaactacttcaagtatttcatgtggttaaaaaaataacatttataaggtagttttaaaggatgattactttctatacctaagaattagatgcaacagcacaagtgattttaaattctaaaatgtgacaagaaacctactgtatcaaaaataaaatcttatgaaaaattctaatagagtggaggaaaaaagactgaaactataacatgctactgctaaaccagtgtttattttagagacaaacttctcaaaagtagcatatcctgcatatccttaataaagtaaaaatagtattttgtcagaagcatcttggagtgagaaaagaatcaaagaaataataagggcttcagagttggcatagatattatgggttaagtagctcaactttctcatttttcaggaaaaaaaaaaaaaacaactgaggcccagagatagttctataacaagtacaaaaatggtaattacaaacctagtttggatttaagatttatgttctgatactttggttgagcgacatttagaatctctaatataaataatgctgtttaatactcaacagtcagtatggttaataaaaaatatagctaagttttcgttaataaaaatttattatttattacatgccaggcactgttacaggcatatgagttatttcaataaacaaaagttttatatttaaatggtactttacaaattttctaattatatacataagcagtatcatttagtatttagtcttcacatatccaccctgaaagagccagggggactattattatttccaccttatgtatgagaaaattgaaactcagggggttaagaaccagatgcaggacaaaaaccggtctgctcttcagttagaccgactagattcaaatatggttctcctacctcctcctggacaagttactgaggctttttgtggcccagtttcctatctaaaaatgaataataatctatgtgataagttgtcatgaggatagaataaattaatatataaaaaatgcttagaacagtgcccgacatagcaaacgcttacatttatctgtattatatcatcaccatttctctatttttataacaatacatttctaacacttactttaatttgatattttcaaattctttgatttttaatgcagtgatttctttttgtttctctagatcttgtgatactttcttcagtctgctcaaaagtgaagacagagagtcatcctgttctgctactgtctgttccatctcagccagacgaataaaatgcttattggtgggaactggagtaggagattgtttcattaaatcctatgaaatatgaatagccaaggaaggacatgtagagctcaataccatatttattgtattttttaatttagtttctcaaatgatcaaaatgtaacatctaatctaaaatttaatatgcaatgaaagtttaaagacagaacatttggcaatgaaggcttcattctttgtattcccagtatctagtaaagtgactacatgtagtgcagggtcaatgaatgttgactgaattaatgggttaaggctgcaggatgttaatttgcacagttaagagataaaaggtcacatgacacctacagatcaaaacgatcaaaagaggtgaaatataagctgaattgaaaagatggaaaccagttataggtgaaacttacaatgtgcagaatttaaaaagacagactgaggtcagaccatggaaagctttgagggcattactatggagtctgaacatagattttgcagacaatgttgagctactttgggtctagggagaagaataatcagagctgtgttttcagaggactactgtggcaacaaaaggtaggggtatttctattgtaaataagagctaaattttaaattatatggtctcaaaaatcactaaaaaatagaaagttcttagacccttacccaagctgtttgtttgaatttattgagtgagctatcagcctgtagttctaatttatgatgaagaatatgaaggtcttcctcatgtttcttaacaatttctctttgctcctgttttacaacaaatcaaagttataccttaaactgtgattcaaatgaattcacattcctaatatcttaaatatcttattatctgtaatcttttaaaattcctatgagataaactaaaaaccaaaaaccgtcgagtcaattccaactcatagcaaccctatcggatagagtagaactgccccatagggtttccaaggagtggctggtggattcaaactgcctaccttttggttatcaacctgagctcttaaaccactgtgccacctgggctccctatgagatagggaaagtataataccattatctacctacctacctacctatcaatcaatcatctatatttagattagtattcactttcctcagcacatgttcgagttgtcaagcctagccttagattataatttattcttaactctaaaagaatatgtattcatcaccttttaacctgttttaattttagaaaaattttacagtgttaaattccactcctccccaaaattccaggaaatctgatttccactggtaaccagtgtgacagatttcactctgcctcaatccttacttacaaacttaattgtcattttttaaaaaaagacatagcttcttaccctagaagctatttctgatttagtccctaagagaatgacacacatacgtaaactgtcagtcttactgacagatctgtaacccaatcatataaaaggaacaattcctaaatagaatcatttgaaagcaagaaataaactaccatttcagggtgaaataattttgacggttgactaaaaacatgataataaataaaatagcataacataatataaccaaatacctctctggctttttctaggagatgctgatatttctttaacacttcctccttttgatttaaccttgcttgcatgtttgcaatggtttgatgagcaattttcagtgtgtggtgagactgtggttccatctcttttctgcctagctcagcaataagcttttctcgttctgctgtggcaggcaaacgaagcctcaattcattgattactttatcccttgaaagaatattttgctctgctaaccgtaaagcagattctttttcttttagcttctgcaatgatcaaatcacaattaatattattaaagtatattttttcttttaaaaatgcttcatctgaattttagtaagattagttcaaagaaaaataggagtttcacttcacttttcacatcatacttacaatacacatctgatattaaataaggttaagtttattgtacttctatgtaataccacttaagagttatttgtatgcatattttatttagttataagaatatcacatcgtagaaatgtccttatgataaacatgaagtttaattaaggcacttatttagatcttgcagattcagaaccagaaatgcatgatgttgtatttagaaagggaatttaataaatcattccttttatttaggtccactgactatcagaccactataaaactaatctgaaaaggtcaggtgagtacagaaattggtacttcagtggccagagtcaatgaatccccatgataaaatctgcagtttattaaaacaaaacagagaaaggctgtttactcttcagtaggattaaggcagatactttaaaatcaagtaactcactgccaattcacatgaatgataaacctagttataattactgaagaaaaccttagtttcttcaattactttcagcagatcggtacacccaaaatgactagtagtgattgaatggctagtgaattcaaaacagccatatctactattccttattggctattacaagcattacggaagagaggaaaagcagagtggaattagaaacagatactattcatcgttctatgtactgccctcataaccatgtataacttagaaaattacacaaacatacccagtaataccctagttaaaatacaaatttatgtggttacctcttctaatgatttgcatgttgcccgtgtttctacgattattcgaacatcctccttaatttttctcagagcaatctcaagctgatttggaaggggcaaacaagggtctggcattgatcccatggcctcttcaaactgttaagaattagaatttttttttaaaaaaagcagttgcaacactgagaagaatgttaatttttacaactataacaaaacacaaaatctccacttatattttaaacacagaaagataacatcagctaaaattacatctgactttagaagtattcctatgaattaacattttaggccatgatacagaggctacagaagcattcatgccttttgtgctgcatttagtatttcattttgttgacggtcaaagatgtctagttgacgttccagctctacttctctttgatcccaggccatttgtctttcttcatgaaactgaaaaaagatagtctttattagatatgcacatgcaaacactcaccaggcgtataacagtcactctgcatatattttttatcctcacaataatcctttgaggttgctattaatagtctcattttatggaaaaagaaacaaactcagaggtgaagtaacttgcctaagatcacagagatagatgtggagttagaatttcaacccacctatccatccattcatccatccacccagccacctattcattcaacacatatttaatgacagatactatttgccaagcattattctaggcactgagaacacagcagtgaacaaaagcacgtttctacagccatgaggcttacagtctagtgaggggagacagacaataaacaagcaagtaaatatgtaatatgtcagagggtgacaagctggagaaaaatggacatcctaagaaatgcagtgacagatggaaaaaaaaaaaaatgaagccaggtaatctctattgagggaatcttgacggtaggatttacagttggaaaaaaaaaaaaaattttttttttttatggggtggttggttaaggctgcactgataaagtatgacatttgagcaaacaatacaggtatctgggtaagaataatgcagggagaggaaaaacaaaaacctctaatgcaagcatgtgcttgatgaactccctctgcctctaaagtacatacgctttttctacagcaagctgtcttttccttttccaccagtgaaagccagtagaaactgtaactgtgaacagtcaaataactaatgccaaaattaaaaaccaacatatggaataagatggcttatgtgttgttccttataagtaaaactactattacaacaactaaataaataaatatgcatatctgaagtagtttagaaaataaacagaatattttataacacaataatgggagctatattcaattagaataatgtagtcatcactcaagcactgttcatatgatttaaatcttaacataaataaataaataaatataaaacgaaaccttgttctgttgcacaatttcttcctctagactactgattgtatgctcatattcagaaattatgttattcaaatattttatttcttctttatccttgactaattctcgatttagtttaagctcttgaagacgaagttcttctattttcatatgccaattaattacctaaagatttataaattatatgtacaaatataaatgctatataaattatttctccattgatcccaattattttaactgaaattaatgaacaatatcctataataaaataagatataaaacatctttagtcaagccacatggcaaagcttatttggaacttccataggctcttttctaagaatatgtcagatcttaacatgaaacttcttcaaattatgttggaatggatatcactcttaacattcactttcacattttctattcatttcacacagttattaagcacttacttaaattaactgagcaaggcaaagtaatgctagttttactttcaaaaaatggaaatcctagctacttctagcctacagaataagattcagttgctagataactgtttttcatttaattatcaagacgggataaaaaatgaattatattaaaaaataaatgtgaatttactatttaaaacaattttaaacagctaataattataaagagtagatttctaataattagcactatgatggctaaaaataattacaattagcaattaatataggaaggtttctagagtttaaagctctttcatcttatacaaataagcacttatattgagatctctgtttagaatcatccttttttttaacaacacatattcaagagtcaaaattcctaatttataaaatcaaaattaataaattataattttggtcacacactaatcatttttcatagaggcacatattaagagcttaaaattatttggaaatactggatttaaaatccatgttttaccttttgggcccccctggaatcctttaaagtgcttattaactcttctaggccttttaactttaattccatctccagtgttttgttctccatagttctgtgttcattttgagaatttttcatttcttgcattatcttaagtttgtcattttgtagctgaatcattgttttagagaacttttcctgctgtgccaagggtaatgctccactaaactgtcgtcgtagagattgaattgtttggcgtagatgttttgctctgtttctcccttccgagcgagcataatagagagtctgctctttttcatcaagtttttgctctaagcgcaaattataagcctccatcttctgcagtttagatgtaactgactccaacttacccagagatgtagcctcattaatttgaagagagacaataagttggtgcaacttggcaattagtgccttctcatcagactgtgcctaatatcaaaaaatatatatatatatttgtagtaaattccaaatttttccaattaaacttatcgtgaatttaaaatcatagcttactaaataaatttttaaagcaatggtacattagatcctataaaaatctaaccatgctttaatacaaataactaccaaagagaaaaacatagaattaaacatgtttaaaatcccaatatggcatcaaactaaagttgaaatattactctgtttttaacctgcatatgcaaataagaacattagtatcatactgatgcagatgatgtaatggttattttttaatcctaaaaaatttatatatgaaaactacatataaatacaagagaaaatattgttatgaatgactattatttatcagcgccttagctttgattaatagaacgatgaagctatagacacttaaatgcttttctggattatagcgggcatttcaagctggaagtatttttccgacgtggttccaactaacaagaataggaccctctggttggcatattttctgataaaactctaaaatcatcccaatatctaatgtgaatttaggtaaaaaagacactatatctatatagaagccatggtgatgcagtggttaagaccttggctgctaaccaaaaggtcgacagtttgaatccatcagccactccttgaaaaccctatggggcaggggggcagttctactctgtcctatagggtcactatgagtcaggatcaactcaatggcaatgggtttagtctgtttttttaaaatatctatagaagtgccaatacagtacatacctgatagtctaacagttgcattctgagggactctacttccttttccctggactgttgttgtgtattcagtatttcaacttgtcttttggcaatgtcagaaatctccctcagtctaggaagtgataaaatgtttcaggaacaattaagcacattttctaagttaacaccaaaatttctaatttctagaccactggaaaagtcattagcttccaacacctctctttgtataaaatactaaagcaaggtttcctaagccatgtttcatgaaacatgattccataggaagttaacaatggttctgtgaaagactccattctcaacaccgcattctcccttgaaaattcataatacatagtatttatattacatgttctaataagttctaaagtaaataattatctcaaactggacttaactatatcactttccaaatatatacagccaaagaaactttctcccacacctttttttttttcatgaaatgctaccaaagtttggtatgctagaataaggtaataattatgtctgataaaactatacagttaaaaatatagaaattttaaattcctaaataccctaggtggattaatgtatgttttgatttatcttaatttataagttatcagaaatgtataaaacagcaaagtaagcatttgcttgcattacaaaaaaagaaggagcttgatggtaataaatctttcaattttccatatgactgctgtgatgaaactatataggcaaagtaaaatgttaagtttctttgctttgggctggaataattttagctcagtgtgattgataaacctggttttctcatactgagcagaagttctcattccagttatataaatcttgactaatataataaaaatgaataattataatttactttatttcaacagatgagttccatgaagatagaggaagaacagaaaaaaaaaaaaagagtccttaatgaaaaaggctggcaataactgatattcccaaaaggactattaaggctccaaaaaaggtgactgtaactttatgagtaagccatagaaacaattttgtactaattatttcttcttcacagattgccagtgctccttaactttttctactgaagtagcagctaatctcatagtgatcctattcctaggctgttatctttacaagagcagatggccaggacttttcccctacagagcgttggagggttcaaaccgctgacctttctgttagcagcccagtgcgtaaccattgtgccaccagggctatgagttgaaatcaactcgagggcacacaagaacagcagctaattacaaaaggagtatgagcaacaagtatctacctggcacacatatttactctttacaaagattttgtgtgcgaggctagctgagcctgtttcctcatgtaaaatgaaaacaataacactacttcaggattattaggtgtgactgtatgagttagtacctgtttagtacctagcgcaatgcctatctagtacacagcagatgccgaataaatgtaaattaagtcaaaatctgaatgcttcattatgtttctatagcaaccttatagaaaacatagaagagacactattacttgtttattaaagtgaagaaactgaagtttaaataaattaagtgattgcttctcccagaaaaaataattagtatgtggagggtccaggcctcagaaggtcttgattccaagttcagtgctttccacaatactattcagattctaaaaaatgtaaatcttgagagaccatttcttcttcaatattattatttaaccttgttaaatactaaccttgttaatattatttaactctgttcttataaaaagaaaccagtatcaactgatactaagaatattacccttcttctcctataattaggtttcttaaagataaactccagcagacacatataatcaaactaactaaaaagtttgcatgtacttactttgacacttcaacttttagttccatttcattcttctctaattctagaatccgctgcctatcagcatcatttactgctttgctcacactatcagctaattcatctcttaacatctgttccactttctgtgcatccaaattgattttagtaagctaaggaaaagaatcatgaaaaaaatgttgagatatatcaacgttggtgaggttttccttgtaatttagtttttagaatactgcaatctactttgcaatctactttgcatcagttcacatactgaattgggtgggtaaaaaggagaatgagtcaggaaccaattttagaaactctagctatatttcaacctacctacataaaaaaattttgttttttgtttacatatatataaatatatagctatatttcaatctaccaaaaataatttatattaggcaactcactagtaatatctgaacctctgattttcttaacttgcttggaatgcagtatattcattctattttgttgcaattatactgtatcacctacaagtaccatatttttattcaaataatacacacctcctacgactgtttgccaaacgctccttctccccctcgaggcatttttataagcatactatgctactatttttacagcaacatgtgaaaaaaaaaattggcaaagtggtgcttatgaaaatacctcctaggggaagggcacgtttggcaaacagatgtagaaggcacacgttatttgtgtaaaatatggtacaaccaaatgagataataaaatcttattaatatagatttaaaataaagaaaggtgatatatatggtttggaacatatactatttctccaggtaagcaagtgaatattacaagcatgctactttgtcataaattgctgaatatttgcaaactatatttattgctaagaagcttaatgactctgatcacatcaaaaaagtctaaaccctcctattagattataaactccgcgggctaggattactgtccattttgtttatggctatagtcccagtccccatatagtgcctaacatgcaataggcactcaataaatatttattcaatgaatgaatagtagtggaaggcaattacattattaagcaaataacatctttcacattaaatctaataatgtaatctggtgagaaacaagatctcattcacagaaaatatctgctttatttttaaatatttcagacttaaaaagaaattatttatttatttatttacacgcaacacagccactatattaatacactacttcagagacacaaataagcctctaaagaataatacaatgtctaccaagttccaagcttaattctttactcactaattgcatgaaaaatttatgatatcgaacctcagcaaatttggtttccaattcaaaattacgttcttcgatctgttttaatgaagtccttaggtgttcatacattttttgagaatgttcagcccgctgtctttcatttaattccttcatttccagcatggtgattttttttgaaatagaaacgatttcactgttggttactgattttttggtcttctccatgtcagattcatttcctacatgcaacaatatttaagtcaatctcatgctgcacatatcaaaatcctatgccagatatttcagacgacctatataagaaggcagtacagttccagggaaagcacatcaacttcttgaattatgacagacctagattcctgacttagctctgttacgtcctgcctgtataatgctgaacaactcatttaatctctgtagaactcatgttttttattaatctaaaaattaaaaaaaaattattcctcataagatctttgaagtaacgcattaaggactccgtataggaagtatcacatgtagggaatcaaaaaaatagtaaatatatatatttttttaactgaaaggaaataagccgtatgagaagagatgtggtgaagcacacgactttgtgaatataaattcagtgacttgattttaaagtctcatatattcaagttgtaaagtgtaaaaatctgaagccatacaattgagggatatttccaaatatgatcttcttgaaccacgagtattatttggactttgtacacatctagtatcagtaaaatattttacattctttagctagttgttacatcctaattttatatatgtagttgtatggcttttctttcaatgcaactctgtggttgaatgaaaagagaaacaaaaccccccaatttaccatgaaaacgaatgacaaagaagtatcattagtcacttgccctttttttctgggatggaaaaaacgtttacttttgctttgcaatgctttgcataacagacaggctccagaagtggggggggggagttggtaaagacttttttcctttttagagagccaattaaaactcatatgcttagggaagtcaattatttaaatgaatcaaacagtaattcactttgtaaaaatcctttataacaccagtaatgccctcctatttttctagcctcacaagttcaagttttataactgggttttagttctcttttcattcaactacagacttgtgcctaacgaaaagccatacaactacatatataaaaattatggtgtaacaactagttaaagaatgtaaaatattttactgatattagatgtgtacaaagtccaaataatactcgtggttcaagaagatcatatttggaaatatccctcaattgtatggcttcagatttttacactttacaacttgaatatatgagactttaaaatcgagtcactgaaaaagtaatacacacttttttcaaaaacaaaaaaactgtcttgatgcctacctcagttttaaaaagcattttactctgttctgcatgtatctttaaaatatactattttggcaaagctgctgcaaatagtgatcttattgctaaccacagcagattaccagaagaggctaaaagcattagaaaaccagcccattatgaaatagtctcattcaggcaaccctaagcaccatggatacaagggggaaaaaaaaaaactgcactaaatataggaagaacacaaaactccctccacattctatactgtattaaattctgctgatgcagaggcaggtcacaggggctgaatgagacaggttagtcatcaaagtgttcttgtctgaatgttttagacagagggaagggcacaacagcccaacaataagttcctggctaaaaaaaagtgaagaaagtggcacacttaaacaaagacataaggccaacaagcaatgaagaaaagcttttaaaactgcagtgatacagagccatgcatgggagagatttaggtatttgaaaattaagtaattcctatagggaattaaacacttacagaaataaggtaaaatgaaccaaaaatctactagacatgcattaactcttttatatcttagtttaaaaggtatcttctttcatattcaatctcttaatgaattaaaaattacatttctaaaattagcttatcttaaaattccaaatgttaggcctctctaaaccacaagtgttagttaccaatttaaccatgaatagcattaaagccctaaggtctcataacaaaaacactttatccaaagcagcagatttattttaaaatgagaaatcacaatgctagtgagacaaaattgttaaaatgtcataaactagaatgagcatttgaaaaatatgtaaaaccctagcaggagccatagagattttaacattctctgacacagtaatagctctcttaggtgtacatgaaggtgtgcactgtggcattataagcaataacaaaattaagaaaagctagtgatttaatcacacaagcacagtaggatattacgtgatatgtacttttatatgtatgatgaataaaatgtggaaaatatttttgatatctactaagtgaatacactatataataatatttaatacatttatcatattaaagcatataaatgtgagcgcatataatgtaatacaaaatatgtgacaatactgtattggaattatgggcaaaaaaattcctttcaaattttcttcgatgttttatgtttcatgttgaacttttaatttaaaaatatcaaatgatatatattcctaatataaccttacacatggtgaaagaactcataatactattttttaaaatacagatattttgaaattatcaccaatgttataacaattgttaaatggttcaaaacatctaatgcttagtcacaaatgtttaacatacatgatttcaccaaaactaatttaagaacagaaaataaaaattgggtagggattaatatacgatattattcaactgtctgctaaattaaactttcaagcatagagttaatttttatcaaagtacttccttttcgtcgggtatagaaaaggaactttaaatgaaaaatatttattagtagatcttaatgatttcatactaccagagtaaacatgtacctaatttagtttcttgttcccaggcttgttcaatagtgtgaagtttttccttggtaatctccagttctttatttatagactccatttgttctttcagggatgcattttcacactgaataagacagacacatcactgagaaacaaagctgtaattcagaccaataccacagaagtgacattgccttaagtttatgtaataagtccaaaaatgcaaatcaagttttttataaaattagaagttcttcccaaaataacaacagcatgataaacctatactgtggttaataatactttcataatacaaaatattatttaaaaacgagctgcaagaaaaggatcactaaaattctgtatatccaaaataaggccctcaatctgtactatcttcaccttaaagctgtatgttctttttggccaagcttgagtactcagggtttcacagccttcacaaaccagttattgtttctctcattcacacaaatagttactgaccatccctaacctaccagcagcgacacatgccggttgctcatggtaaaaaaaaaaaaaaggacaaaattttggccttcataaggctcgtcatttattgcctatgtgtatgtgtgtgtggtagaggttggagagagcgtggaaggcagcagataataaacaggtaaacaaataaaaaaattatttaacaagggaagatctaaaaagaaacacggtactgatccagagactaataaaaggatgtacatatagagagtggttgaagaaggtctcattgaagggaagtagaaggagtagtattgagaataaatcagccaaggaaagagccaataaattggcaaacccaaatgctctaaagcaagaaaggatttggaaaaaaaatggggggaagtctaaagcaggacaggttttggaatgttggaggacctgggcatagtgagcaagaacaagtgaagagtgacagacactaaagttggagaggtaatcaggagccacaacaggcagcacagggtgtatcaggaaaaggaactgaaacttaatttaaagaataataagaaatcattctgagcagggaagttctaagcaaccattctggctgtaatgtagagaataaattaaagtggtaaatagaaaaatcagggaaattagtcaagaaggtatcgtaggagttcagatgagtgatgacactggttttactagggtcacagcagtgaaaacggagaaaaaagggcacataggaattacatttaggaaataaaaatgacaggagaaaggaatgactagagaataagtctaaggtatctgcttttgactaactggttagataataatatatactgaaagtggaatgattgtgagaaaaacatgaattggctttttctgaacacactaaattttagatgcctatgaaacataaagaaacatatgagttgtaaactagggtcattccatacagtggaccagagctctgagaaaacgccaagccggagacataaatgtcggagtcagtagtaaaaacatattttaagccatctgttcatttaatctttaataaacagaatgcctactatgtgcctgatattctaagcactggatttcaatggtaaacaagttccattctggaaattttattttagcagggtagctggaaaataagcaaatataattcaatgattgataatacgtgttgtgaagaataacaaagcatggtaatgaaagggaaaaaaaggggagggtgttatgatagaaaagcaaaataaggaaataaaatgtggctttctggtaaagtgcacaactacaaccctgttctagatactgtaaaatacagaaggaaaaaaaaaaaaggaaaagagggatgaggacgttttaagtatctttctactcaatcatttctatttcttccagcctctaaagataaccctgtgcttgctcaaattcccatcttctttcccctgcctggtatcttgctcttctgcttattaccactctcatcttcaatcattctttccctattagctttaaactttcttttcccctcttattaaacttcattggtcacctttatttaaaaacaaaacaaaccctccttctaaccctaccttactccagctctacttctcttttcttctactacataaaatttccagtttttctatttccttattacctactctattctttacatttcgaaatctaattttcatcacatctattctcatgagactttattcttaaaagacatcaatgatttcctaatgaccatatttgatgcactgtggctctacatcaataatcacactctcagttcaacacctattagctctaatgctgccaaaaaaaggaggtactaaacacataaaaatgaatagagtccctgttattaaaagatttatgttcctgtagagaaggcaaatatataaacagatataatgtgatataaatagtagaactatgtacaaaatacagaactagtataggcagtggagtgatttgttccgttaaacggaccacaaataactgatggcttcagaaaaaaaggtaatgcctgaacgagttttgaaaggtgaatagagattcactgagcagataaactgatatatttttgtaggcaaagaaaacagcctgtacaacagaacatatgaaagaaggaatactgtgttgcagaaaactgatagttcagtttataaaacataagttgtgaggcttcttaaagcaggagatgacatgaggtaagtaggggacttatcacaagatggacttttgggagcttctgataagttttaggctagggagtgacatgttcagattcatgtttaggatgattattctggtggcagtaaggagttaagaccgaagatagggatatgagcaatagctatcacagtaatgataaagaataaaactaaggtgttgccagtagaaatgaatgtaaggaaaaaaacaaacagacccattgccatcgagtcaattatgactcatggaaaccccacgtgttacagagtagaacttctacatcgggttttcttggctgcaatctttatggaggcagataggcagattgccattgcctttcttttgtggcgtcactgggtaggtttgtaccattaatgagagcagtttgtgccacccaggggccttggatatgagatgtttagaattatatctgagatgcagcaagtgtaggagagaaagagacactacaactaacaggtctcttaatcggatgatgtatctgggaaaatgagtacattcagagtctcaaatatattgactttgaggtagctgtaaatcagccaggcaaagattttctagaaaatagcaggctatttcaaaaaaaaaaaaaaagccaaacccattgctgttgaatcaattcactcatatcagtcttaaaaaaaaaaaaaaaactacaaatgttcagcatttcttccactgagaggtagaggctatgtcctctccgattaaatatgggcagcccgtgactgctttgagcaataaggtacagaagaggttgacattatgtgacttccaaagctaagtcgcagaacgtgatgtggcttacaccttattcactagaacactagtactagagcagtaagcggtcatgtgagaagttcaagtcctctgagactgtcatgctgtgaggaagctcaagcatgtggagaagtcatatatagacattctggtaaacagttccagctgagaatcagccttcaaggcaatctagcccagttgccggatgtgagagacgtgccatcccctctctgtcctgtttgaattactcctggcccacaaaacctatgaacacaattaaatggctgtttaacgtactaagttttgggggccattttgttatactgcaataacaactgaaacacaggaactaaacaaatttgttgaagtaattagcatatatgaaaagacaaagaaaatatatcaacatttttttaaaggttcaaaatgatgggaagctcaaggactgcacacacaatcacatgaatattccagccatagaaaaaaccaaacccattgctattgggtcatttctgactcgtagtgacccaaaagaacagaacagaaccgccccatagggtttccaaggagcagctgaggatttgaactgccgaccttttggttagcagctgagttcttaaccactgtgccactagggctccattccagccataagaaccatcatattattggtcatattatttccctgctcaaaaataggcaaagacttcccactacctatcaaaaacattccaaactaatctagtccttcatgaatctgcctcaatcctttccacttaaaactcagatacataccacttgaaaaaatgaagttctcacttcatatttttctatcttttgcctttgcctgtgtttttccctctgagtaaaacagtcagtcttctccactcccaccctatgtctgcatgttaaaactcttgaaggctcagcataaactgcacctcctctgccaggtcagaaatagcctcttctttctctaaactccaacagtgcagttacctgtatctctcttatggcattatcacttgctatcttgtattctagacctgagaatcagaaagaccacttatgttttcatctttagtatataggataattaagcaactttaaaatatacgcccctaattgtgtacaaagaggaaagatgagaaatagtctttgggaaaatagataaaactaaaaaatactcattgacatattatgtaccaacaatttccttagctaggatttactaatgctacatggaagagggaagaaggcatagagaaagggaaaaaaaaaagttattatcacatctaaacattcacaattttctataaaaatgagcataataatgtttttggcaaatgtaaacagttaactgaccatgaataatcctagacactattaatacataatgactcaggtacttttgttggagtcattgaaaactattcgaaatgttttgatttactaaacacataccaataagcaaggaaaagtgatcgaaccaaaagaattagatttcatcccactcctatgagaggatcttagaagatataaacccatattgcttatgagcaagacaaacaaattaggaacttgttttacctactggaaaaggtatggatatcaagtggcaagaaaatagtaaaaggttctgagccatatttacaggttgtttgaatgaaaccatgatactccactctataataaaacaagaagagactagtagagctcatccctggtcccggaagagccattaataactcatctactctcagccacatccatcccaaggaacagaatccagggaccatgagaataatttactctgggaacaggggtaagaaaaaggggtaagtatttaatgacatgtcctccctttgactacaataacctattacctgctgctttgtcttttctaaacacttgctaaaaagaggcttgattcagctaaattgtgatagtgggctacagaagacgacctggatgaaggtgtccagaagtcactctgcaaactataggaattatacatgtgtgtgtcataatactcaggaacaaaatatttacaattaaatttcacccataaatgataccccttaaattttcagtaacagaactaaatttttttatattaaaatctacaaactctcgctaaagaaaaacaaagatatcactgaagaagaatgggtaatatcacagggcttaaggattatataaacttacctctaactgctccaagttagttgttctttgaacaagcatattatctttttgtaagatgtccctgtacttagctgtcagttcattgtattgtttattggccagttctagttcagacagagagacactattatctaaaactttttggagggctgcaatcttgaaaatggccatttcctatgtaagtaaggatacactgagttattttcatgtattttcttctggttaagcactagccactttggggaaagataagtaagagggatttgaaaaccacttaaaaaacataaaagatttcccatataagaagaaaacatatagtaataaaattaatttctttcatatgagaaataacgctattttgaaatctttaatcataacaaaaataaagtaaatcagccatacctcttataactcctgtcatcaactgaaattcaattaatttgaggaaagcataataaatagcaagaaattatatcattcagaatgtatctttggacagcttttataaatttcataaagttaaaaaacaacttgcctttttatagctgaatggcaaaattagcattgctgtagtcaacttttacagcttaacattttttgcttactacagttcgactaactttgtaacaaaagaaaactttattttcacacgaagaaaacattatttagggagaaaaaacttctcttcatcatagttgtctgtaataaataatatcaaagtgtttatgttatttgattcatgttctacttgtcagctattattgttattagttgccatcacagagctattaaaaaaaaaaaaacactacttaaaggcactgcaatatttctgtaacaccaaaatgaaaagtttgaacttttagttctttccaagtaagttgctctgtgataaaaattacagacacaagttgaataaagactgatggatactgataaagaataaacaaggaataaccaaatttacggtgtgaggaagataaagaatttatgattataatccattctgaaacaagtaatgagggacatacagtaagtcggggatatattgttgtgccagaaaacaacaaggcttggctcaaagactaatagatccttgtcaaaaggacaaaaaagccagcattacagggatctcactggccaaagttgacagaagagtaatgactccaggtaactgaagcacaatgactatttaaaagtctagaagtctgttatatgatattttaaaaaaagaaacctgaggggaaaacaaaaataggcatgggcagaggacatcaactctgtattctgaagactggtaataaaaaaggaaaaaatgaagcattgattttgttttatagtaggaactatacttcaagacaaccaaatagcctgagctaaagaggaacagctctatttgagaaagcaatgtctgctaagaaatgtagaaaatgatataataagaacatcacaattttgaaactccaagtgaaataattgagtcaggtaacaatcatcaatgaatgctaaagccattaggagggttgacaaagaatcggtcaattgtgtggtatcgaaatatcaccaagctgttgactaaatcacttattaatgaagatacacagctgtctctcttttaatacagcattcaatcatgaaatgtagggcaaccggacattacgtctcatgaagtggttcaatatatagaacaacacttacgaagaactcttgacaaaatatttaacttgaatctaattaagtcttcaaagcttactttcagtaaatacaaggggtacagaaacaagttaaatgacacaaggagagtatcagacaaatgtgcgcatggtctattaatcttgttagctgtgatgaaagtactgtggttatgtaaaaaaaaatcataagttttcagcaatgcacacaaatatttaggggagaaacgtgtgcagcttaaatatccctacaagaaacagatgaaataattatggtgacacattaataaatgttaactgttaatccaggtgatgactgttcatgacactattctctcttctgtgtacttcaaattttttataataagaatcaaaacaaaaaaatcagatataccttaaatctttgcaagcatccaattttttcacaaacttctacttccatcgatatcaattcactcttttgttttccattttcttttctaagttgtcgctccatttctactaaagttgtatactgccttatgagtgacttttcattcacttgcaagacagtgatttttctactattttctgcaagtatttttttcatttcatctgaatccacctgaagagcattgagcagattctgccaaagacatatttacattatttgttgaatctagctcttagtttcttcagtattatatactgatcttaaaagtgtttcacttacattatattcttttacttttatagcatcttgttggatttgatcttcaagttttttcttctcctctttcactgtttcagactctttcttccaggtctccttttcacttaaaaaaacaaaaaaaatacagtaaacataataaaatgctttaattttaggaagagataactctacattatggaaatttaaagttttcttaaaacaacagagacatcatagctacatggtagctgatgacattaaagtccaaattccattcaaaagggtaacaactgaaactgggtcttataaacgttttattaaatatagattagaaaaataatcagtatttcaaactaattctggaaattaagactcaatctgaccctactcttaagtttgaatattaagtatttgtaaaataattaggatgcaaacaaaattagaaataattaaatttaaaagagggtggggaagacatgtctgactacttttctcactgcctccaactgactggcataaatctataatggtggcatcgttctccttgtcactaagtggctcagacttagacttaagacccaattctggctaatgagccctgaatcaaaattgactagaagcctctggaaatttttttttttaaacctataaataaaaagctatgtgtaaaaaaaatgtcccttttctttaatgggcatggttctgtccaccttggactcttgcagctattttacaaccaaagtagaaggtaaggacaacccctgctctgacacacacgggaggtcaccatgagttggagttgcctcgatggtaactaggaaaaaaaaaagtgcgacctaccctataactctgagaacacactagctttgggtttcttgttagatcagaaaataatcaccttcagtgtttaaatcacctttggtcaggtattctgatacatactaagcaaatgattctacagattatagatgatttttttaaaatcaaatgatgaaaggggtaaggagaaacatgttagttccctatgacaatatatgtaaaatgatgatggcggtgatgatgaaagatgctaaaaatagctgacatttgcgtggtgttcataacatgccatgtactaaactgagcattttcatgtataactcacttaagtttcataacaaccctatcaagaaggtattcccatcatggaattttacagataggaaaaatgagatacagataggtaaaataacttgcccaaggtctcatggctaccaaatggaaatgtctgaattcaaatccagacagaacaattccagacaatggatgggcttctaatgattaagctacaacactatctaaaaatctgttcttgacaggtcaccagtttaaaaaaaaaagtagacggggagaggcagaaaaggaaaagtcaaatgaaatatctaaacatcatttatgtaactttaatcatgaacaagaatatacatacttatatttataaagttttgctaatacatataccttagatattctttatataataagctttgctggtgacgaattactgcaaattttctgttatagtcttcaagagaatcttctaagttctttaacttcttttctttattttctatttcctaaaaattgaaaatgaaataaaaatgaaaaaggcataaaatatacattttaaatttgaagatacatatttatattgacaggattttagaaaactatatttttttaaaaagtcaacaaattcataaacactagtgatcatttatataataggtaaaatatttttatcatatacgactcgatagcactgggtccgggtataataacagtaaacacaaattttcaaataaaatagttgccataaacacaaacttttattagttataatagttacaataagtacaaatttctaaaaatttatagaaaaaagaaagaaaggaacgagtaaggtgggaaaaaaagaaaacaaggaaaaggagagataggagagggtgtgatttcaaaggcataaacaaagagaaaatgaataagaagggtctgttacagacatgtaagagaaaaggactagaactaagagacctcgttgttcactacttcccaattgtacgtcattagcattagtcaatactgagctacaaacccacatttctaatgccacatttccatgtagatttttttacagatacattgaatttaccatgactcagaccaaattatctttctccaacaccaaataattcactcctcttacgtttgtatttttagttataccagtatcaagtattcaatttgctaccctagagaactttttcttttctttccctcatcctccatgcgtcatcaagtctgtgaaattctatttttccaggatcactgatacccgtcccccttctgacctccactattcaactttagcacaaactttcttcaactcttactatactaaaaactccttgccgttgagtcaattccaactcctagagaccctttatagacgctgactgccatatctttctcctgaagagtggctagtgggttcaaagtgccaaccctccggttagcagctgagctagctactatggctccttcagaaaatactagacatatattttaattcttcctcaatctttagtagtctagtctactagatactagcagtggcatggaaaattgatggaggatctatatagatctgtatctataatagcagtatggatctattctactactggtatctttgtaaaatataacctgttactaaaacatgtttctcttttgagttaggatttactacaggataaaatccattcccttaaaatggaactcagggtcttcacaatgaagtttcaacatacccttacacactcacctctagtcactcagccccacatacccttttgtgtacacactttcatgtctccactcaaattaccctcttcaagtgatctattttaaagttgaagaaattgagtcttagcagattaggtcatttactcaacatcaaaaaactcatcagcacttggcaaccataaaccaaaaccaaaccaaacctagtgccgttgagttgattcctactcatagcgaccctataggatagagtagaactgccccatagagtttccaaggagtgcctggtggatttgaaccatataccagcataaatgccaagctcagtgctagctcagtgctatatgtagattcaacatttgaggtcaagtctctctgactccaaaggccttaatattttcatcactttatgctgccttaggaatgggagtctaagtatttgctttgtcactctgaacaggctttcacactcccaatctggtgctctctatctaccataattgactcatacgctttttcatataaaactgaaaacaaaacaaaaccaagattcttaagtcaaataacaggaaaacactatactgtcattcaatgcacgctgacagcatccttatattgcaagaaataagagaaagcataaagagtgctgaaattataaatttaaaagtaatgccataacatgaaaaagaggaagaccctcaacgagctggattgacacagtggctgcaacaatgggctaaagcataacaacaaccatgaggatggcccaggaccgggcagagtttcattctgttacatggggtcgttatgagttggaaccaactcaatggcacctaacaacaacataatataaattatacaatcatatcatgataaaagtttaaggttgtctcattacctgacttagataacataaaaattttaagactcagaaaagtaataattaacgtactttctaaatactaaaacaggtatttgataataactcatgtatattcaccaataaaccatctaggagaagacgacaaacatgctaataaacaaaaacaattttcattgattttgactaatttttgtaattatacttatagtatatatgatattacagctattcatacttcaaatgaaataatgagaagcctccctcgttaacccaaaccaaacccactgttgtcgagtcgattccaactcgtagtgaccctacagtgatcctataggacagagtagaactgccccgtagagtttccagggagcaccttgcagattcgaactgccgaccttttggttagcagccatagcacttaaccactacaccaccagggtttcctccctcattaggccattcataataacatgacatagatagcaaaactaagaaataaacacaggacaagagtactctttctaaattgctgatggactaacactttatagagaaaaaagaagatataaaagataatttggtttaaaagttttttcttgtgattaacacagaaaaaggttcaattctacttatgacactgaaaagctgtgtcccactttactctcttgcattgcttttccaaccagccataaataaaagtgtgcaccttatttacacatcactcactaccttatagtaaaggagccctggtggtgagacggttaagcactcagctgctaaatgaaaggcggcagttcagactcacaagccgcttggcgggagaaaagacctgatgatctgcaaaatcctttggggcagttctagtctgtcctataggattgctatgagttggaatcaatttggcacacaataataataatcttatagtagctacttgtcatcctactcatcaattatatatttcacatgactgacatataatgtcagcaagatgtgtggtcatgtctctcatgcagatgagtggaataaattggttttagtcatagtattccatccaacttcaaaattcattaaaaatatatctcacttttaatattctgagagctcaaaggaatacaggaagattaaattatgaaacatatcatcaatggttttggttattcacatgtaaatttacctgtaagagatacactaaatattcattctgagaattaatgatatcggcactagatggtgctatcccatcaggtaagtctactcctttgaaaacaacatttggtctttctgattgtcgtaaaagagcggtctctttgtcaagatgatctatctgaaacaaacaatccagggaagaaaaaaatcaaacttttgcaaccaaagaaagacacaattaaaagcagtaccttatgcaccatgtttttttttctactgagtatctggaaaagtatacatatatggatgccctgccaggaattaattacacaataatttctactgagaaatgtctagatataagatttagaatatttgtgttcttttttataagatatttattttttcacttaatttcataagaaaaatctaaacacgagtttacttaatgctaaaagattgaatccaacggacattttctcattaaataaccattaaaaaaaaaagttccatattaaacctaggtttctatgcctaacattttcttctatttagtggaattctcacctttaaatttgctttagccaacagctgtgaataatttatagcctccttccgagcttccctgagctcttgtcttaattcttcattccttccagtaagttgatcaacttgggctttcaaatgaagactggcatcaaagattccttctgcattctttgactctatagcctaatgtattttgattacatcgaaggggggggaacactatagtcatagtttgaaaaaaagaaaaggatctatctttaaataaaatcgacatttaagcattttactattttaattgccatgcataataacaagatttgccaatttaacttcttatttttgaatttaagtttataaaacttagtttaacttataccacctactcagattaacaatcaagagctgtatagggagagagtttttaaaccctactgaagttaaattgctattaattcaaacctgacagttataaacttaggatgttaaaggcatccctactgtaattacaaaaaaagtatctaaaaaatacacacaaaaggaaacaagaagagaatcaaaatgcttcactataaaaatcaactaaacacaaaagaagacagtattggagaaaatgagtgagaaaaaaggtataagacgcaaagaaaataaatagcaaaatggcagaagtgcttccttattaaaagttattttaaatgtaaatggattacacttccaataaaaaggcagagattggcaaaatggataaggaacatgatccaattatatgcaagagaccaatttgagactcaaaaccacaaataggctgaaaataaaagaaaggaaaaaaatattccatgcaaatggtaattcagagacagctggaatggctatattaatatcagacaaaacaggctttaagtgaaaactgttataagagacaaagaaggacattatataatgattgaggaattgattcataaggaagacataacaactataaacatatatgccactaacaacagagcactaaaagatatgaagcaaacactatcagaactaaagggagaaataattctaccattatatttagagacttcaatacatcacttttaataatacacagaatatctaaagagaaggtcaataaggaaatagaggacttgaacaacactatccatcaactagacctaacagacatatacagaacattccatacaacaatcacagaatacacatttttctctagtgcacctggatcattccccaagatagaccatatgttagtcacaaaatgagtctcaataaatttaaaatgattgaagtcatacaaaatatcttctccagcaagaatggaatgattctagaaatcagtaacaaaaggaaaactgccagaagaacaaacaatccagggaaggaacagtaccagagctcctgaaaagtgaggatagcgaggctgactcacttactttggacacatcagaaaagaccaatccctagaaaagggtatcacgtttggttaaacagggggtcaacaaaaatgaaggaaaccctcacttagatggattgacacaatatccacaacaagggactcaaacagaccaacaatcatgaagatggcatagaacttgccaacatttcactctaatagatgaggtcaccatgggttggagctgacttgataacacctaacaacatattttaccatacacacacacacatacacacacacaaaatgatgtcaaacttctcaacagattagaaatgatggagaccaaaagactgtggaacatcatctttaaaatgctgaaagaataaaataaaaccattcacatggaaaaaaaaaaaaaaaacttacattaactagtctttcaaggctagggataattagagatgtttctcctcctttgatatcggggtccttctgcatttctttaatagcttgtaatatttccttcataccttcttcaagttgcttattttcttcaactaattctcttactgtaattacatatttttctcatttaatgaacagatctttattttaatttacaccattctatacagatacagataaagaatattttacatataggaaaaaatacccatttggaaaatacaaatgtaaaaaaacgttttagaaattaaaatacaaatacattttgtaaatagttgaattaaatggtaaatctatttaagtcatatgcatatatacatacactatatcataactgaaaaaaaaaatcataaccatacttgtgccataacttaaacaatgatttatatcaaaaacaatttaagctgttttctaacttcattttcattaaaagaaatgctcttattcatcctcacaaaaaattcagattcgaatatttcctgacagtgaaaatagttaggcaaacagactaaacgaatgagagacaccgagtgttatacttgagaatagtaaatcaggataaagcaggctagaaaacagagaatgtatcaaagtcccatgactctaagtacataaaaatatttcttttaacatacacagaaaaataagagtaatagcaacttacatttattctgaaatttggctattacagttctacttctttctaaatctctttccttttcgattagttctcttgaaagaaattcattctaaacaaaaaatagggtatagttgattttctttttctaaaatattgcaatgatatatagttctcaagttaacaaagtttcatcaattgaagtataacataagagaaccaagtgatagaaaaatggcagcagtcataaaaaaaaaatctgaagagcaaaacagatggtgatcttcctctcaccttctccctttctgcccattgccaaaggcaaacagatacaattttttttttttagtaccacaatcatctttcttaacagtctgcctttacactacctgttctgcatggcttctatgccgttcaagttctatttctgcacttctattctgtgcttctttgatcaataaatcttgtgctatgacttcattctaaagaaacattcaataaattaggcaagttaataagttcataccaaatgtgttgcatttgtagacttttttaaaaaatagaaagcatataaattagtattaatgtacaaaaaaattcttataactgttaaagaactgtgttagagaagttataaaaaagaattaataaaaaagcaatcataggaatgtaatttgtgcaaaagctcacctgcgacctaagacatactagttctctccgtagctgttctataagattgtcaagtgggtctacctgagataattttgactgtgtggtaataggcacagagtccggaagattaacttcaaactcactttttaaactctctgtctgtaaggatacttctttttttcttacatcttctttcaagctgatatcagcatattttacttgggtatgaacctcttcattttctgatgcttctccttgtgatttattcatgtcagtgctattatcgtgaatttgttgacaaaatattgcagatttctgcctaagtgataacctctgcgttaagtctgaagttgttgataaagcttgaaaagaatcacttttttgtatgaaactagtcttctctagtgcttgttgacttcttgacactttcttcagacaggcatcagaaaaagagcataaacggtcatttatttcttcatagctctcccgactaagggtactgactaatgattctagattccttaaagactgtagacatggtgctttaaaaatctctctgattgtaatcgtttctggagttgaattagcatcttttacttgcacgggtgaagaatgtctagttaaagaggcaaaaggattcgctccactttctatactacgatgaatttcaggtaagattcttgataatggtcctacggtcacactgtcttctggctcactctgatctgaccgtggaacactgaatgatgatctcctatgcggcagctctattttatctgaacgcctaatctgtattcagagtaaataaggtctcattaatctttgggtcaacaggttatttaaataagcaaacttttttttcctatttaacaactataaaaaagcagatgttcaaaatgagataatgggggggaaatgaaagcattgataataatatttttcttcattttctttaccatagcaatactttgctatttacctttgatcgagcttcactaatatttttgaggctcatgaaatcaaattttctttctcctgttctactctcttgagaaaagttttcagttaggttcaggtcctcaatcatcaatcctacatataagagaatcaaacaaattaaaaaacataactctcccactattccaatttttttaattatttaaaactagtatcaaattttaacacaaaaaaaaaggtagagttgtttcaaaatccttgatccacatggtagccaattattacaaccttctaatctacctcatttttaataagctattaataatatgagaaactaatctgaattcttattttctctatcaccttttgtgcagtctatgttaaatgtaccaataggtactagaatagttacaagacatgtacaaaaaattagatgagaatcatgaataacgagtaagttagttaatacactaataaattacgaaaattcacccctctaggagtttttcaatgtactatgtaggttgtaaagagccctggtggcacagtggttaaaaaaattgactgctaacggaaaggttggcagcttgaaaccaccagcgactccgtgggagaaagacgtggcagtttgcttctgaagagatttacagccttggaaactctatggggttactatgagtcagaatcaactcaccagcagttttttttttttaatacagattgtaacactaaagcaaaaactctgctatatttacagattattatggactaggatcaagctaaaaaaaaaaaaaaaattcctgccttatattcctcttacaaaagtcactacattggatattataaaatttaaccaattgttacctttacatcaggtaagataaaccaaaaaaaaaaaagggaatttttattcaataaaacactactttcacttagtaaaggctaatttatggagaagattttcaatggctagcccttagggaaacagaaaatattaaaaagtatgaattatatattttatcaatattaatcacatcacatcagtcagggatgcctggaaattaacagagactatttttttatactgtatgctttccaaatgtccacaattctaaggtatttttggtttggttttgttttactgtttcaggttcaggactgacctcaatgacactcatttacgtactcttcgtcaggccgttattttcatttattgaacttctagcagaatcacagtagcatagcaaaaatatctctaacatacagaaaattttagattcagaaaactcattcaatgattcttttacaggtctgggataactgagtatacctaaagttgcagctctttttcctctttcttgagccatttggcgaattttttttttcagatcaagccgttcttcctctagactttcaatctgcaaagcatgaagtattagtattcctctttagtttaataaagaaaatagccattttgtcacagcacttgcctctttcaaaagaatctggttttcagctcggtactgctgctgttttaagtttttgctatttctaaattcagttaaatcaatcattgtcttcggttcaaggcctaaaattgaacataataaaattaaaatctttatcaacattcaaatgtacttaaaaaaaaactttatataccatgacacagttagccatcatcattaaagaatgtagtacttctggtgcagtaattttctagacatttgaattgaacccaacaagttaaaactttatcataattattcacggaaattctgacaaaaatatataaggacctatcttctctatggcaagctgtagtagagatactataatgtattaaggatagaagctttgaagcaaaacaaccctgggtttaaattctactttcgactattaacttctattaagtcatagagataataatgtatttgatttatttatagcttactgtcaggtgtatggaaaccctggtggcgtagtggttaagtgctacggctgctaaccaaagggtcagcagttcgaatctgccaggcgctccttggaaactctatggggcagttccactctgtcctatagggtcgctatgagtcggaattgtcttgacggcactgggtttggttttggggtttggtcaggggtataataaaactaatctaaacaaagtgctgagtacagtgactggcacaaagtagtcattaatattaattatcaattgtattatcattactagtcagatgctcccagcacacctgtctcctaattctagattccaagctatgatctagtacattaagttgatgagaagcccgacttgaggtcctgacttaactctgggccctagttaagacactttttattaaagaatcagataaaaaatttatttttctttcttgtagaggaggcctggtggcacagtgcgtaaacattcatctgctagccaaaaggttggcagttcaaatccaccagccctccttggaaaccctatgcggcagttcttctctgtcctacagggtcaccatgagtcagaatcgatttgacggcaatgggtttggtttgtttggtttgtctggttttagagaatagctatttttacagcgagtcattttaacttttaggaagcatcataactgttattagcaggtataatgaaatcaatatttagatacttatttttgtttttaaaaagcaatttagattgaactgtcataacattcatatttactaattacttctcagaatcaatggcaaccttaaaatacacaaccaaaataaaacttaagcagtttaaattgtaaaagccaagtatttaaaggtctgagaaagccttaaacagtatttcaaaacgtttacataaatccatctgaaacaagatcgctctgcaaactaaatgagtcatagcaatgccacattcatggaaggaaaaaaggttagcttctaatatgtggtactaaaatcatagactttcatttttaaaacaatgtattattactacttctagcacaggggtttctaactgagctttgaaaatcctcagagattccactgatgcctccagaaggtacacagggaactggataaagcagtgcttgaggctgcctccgtgctgtttttaagtccaccaaatcctctatcccatttcaatcagagctgctccgtttttattagttttaaatgtttttacagaaggatttatttgaaaaaatgcattcacctatttattaaaaataacaataaaaatacttgaaaatcagattagagtgaactacatatctgaaagatggcttacctgcacgctctctaagggcctcattttcatcaagcaaatcattgatcttcaactccagcttattgatttcctttgtcaatacttcaatctctcgatctcttattttaatttgatttttacaattctttatttcaacaacagcatcttctaaaccatatactccctgcaaaatgcccaatctaatttaaacctaatgtgatttatttaaacacatttatcaaattcagaaatttatattcttattaagtctgtgaagaaatgcacatatatctaaagtttatatcaccaaactgtgattattactgtgctttttataaaacaaatccagtaataataataatggaaaagggaagaactgaaacttctaatacagagtcttaatgatacttaacaaaatacagaaatggtgcagttaagcaagtcagctatatcagcaggatatggtagtcattagttgcctgacttagttgtaatcatattaaaaatacattaaaaaaaaatacacactaaggctgtgatgacacagcagtttacagtgttcctgtcataattgttaacaagtgaattactggtgttacatctacctggtggcacaatggcacagactgcaaagcctctaatcctgttgccttaccaaaactgattacctgagtgaaaaacgcttcaatcgagatggtttgaaaataattctgccaaaaagtaaatgctgcttaagagtttgaaaagtttagtataaattatccttttatcaaaaaacacttacgaaatgtttataaatgataagcagtaaaaggcacagaacagtctaacggtgagtgataagaatgattctaagctccttgattgaaaagataaaaatacataccgattcataatcttttaatcgctttagagcctcaataagttctttatccttttccctagcatcagcctcagccagttcagctgttctctcagcctcttcagctttctcttctaaactttgtagttttgattgaattttcatataatgagtctgttgagaaagggttgaagcacctaccgggtaaaaaccaaaatcacaaataaattacactgcctactcatagtccttcagatcagtggttctaacatgggaaggagccctagtgatgcatcggttacgtgctgtggagagctacagctgcaaagcaaaagggcagcagttcaaatccacaagccagtccttggaaaccccatggggcagtcctactctgtcctatacagtcactatgatcagaactgacttgtcaacacctaacaacaacaacatgggaaggcaggggaagaaatgctatgccactaaacaaaaaaaattgccacaagtcaatttcgactcatagtgaccctataggacagagcagaactgccccatatggtttccaaggagcagatgatagattcaaactgctgacctttcagtcagcagccgagctcttaaccactatggcaccatgcctctagacctccccctgcaaccccaaccatgcctctaaagagccctttaatgttatgattttatatttgaaaaataagagttctgttttggtttaagacaagttgtagagtttaacaaagtcttattagccgaagggttatagttgcaaaccactgctttacaaagaatgaccactggggcagagactgctagctgtccctaatgttcagcctcccttttgtccaccgcaagagaactgcaattcttagccagacacatggctacttgaaataatgactaagtttttacttcaactccagcagcttaggtgtctccatgtcattaagttaggccaataggatacaagtggaaaggtaacgtgcatcttggaggaaatgttttttaccagaggggagtgactcttctctctttcctccgttctattagccaaatatggacgtgaaggttgaagctcaaataatcttcttagaacatgagacaaaaaccacatgctgagatgggcagacaaacaagatacaggatgccagatacctgatatttgtgcaggtgccacaccgaccgtggactaactgcatcagcttcgttgatatcagagagaaaaaattcttcatactgtttaaactatcattgtgtgtgatttttctgtcacctgcagctaaacttaatcctgactaccagctaaaaaatgcctacttgtacgatcttaccactgttgctagaccacaatataatattcttatcgctttaaaatttactaacacagctcattcacagactcacccacaataaacatttactgatatataaggtatatatctatagaagttcttggcatacttttgcttcagagacttttcacttattttcactacttagagccaccagccttcagatacagtatttgcatggctcactccctcaccttctttaagtttttgttcaattatctcctcaatgaggcttttgcctcagtatctaaattacaaactcactcccaaccatcatcaccacattacatttgcacacacacaacacacactgccttgctatttctcctttatatcttattttttatgctcagcagttacaatgagcatatccatgaatttattttctgcagtggtgctacactgatcaaaattttattctgctccattctttgctaattataagaaataaaacaaccaactgtatcatcagttttcatgtctttcatataactaatctgataatagaggatcacgtaattttcagcaaaggagaaaatgatagaaaacgccttcttcatttataaacactggaaatatctataaaaggagcactggtggtgcaatagttatgagcttggctgctaactgaaaggctggtggattgaatccacccagtgcagtggttctgtgggagaaagagctgatgatctgctcccgtaaacatttgttgttgttaggtactatcgagttgatttttgactcatagctattccatgtaaaagatcagaactgcctcatagggttccctaggctttaatcttcatgggagcaagtcaccaggtctttctactgcagagctggttttgaaccaccaaccaagcacttaattatcgaaccaccacagggctcttcctgtatagattacagccaagaaaatcctatagggcagttctattctgccacatgggttcactgtaagtcaaaattaactagacgaaacctaacaacaccaacaatatctttatagtaattaataacattctgtataattttgaaaatatgataaaatataaatggagaaggttcaataatatattttttgacaagactttattttttaatcaaatacttttggaacatatgacatacaaagtaattttatatacttataaaatattgaattacctttgtttctttggagttcagttttcaaatcttcaataataaaagtatttttttccatttcttttgtatattgttctacttgttcagtaagcatcttaatctgactatctcgttcctttatgccctataatatattttaatatgtcacataataccacttcatgaacattaacatacatgttaatatgtctggaaaaagtaagtctgtctttttcaacgaggctgtaggatacagttttttagaaatcaaactatgctttttactatttggtacaccttaactgcaccacacaatgttagtaactccactcactctaatacttaaagatggatataatgaataatactctgaaaaacaggaattccagaactccttaacacgtttggcttcttatgactccttgtatatacttttttcttcataatccactcaattccatccttttactattttgtatctttgtatttttccctgtattttctctttactaaatttaatttttcctgtcattcaaaaatactatcccctgcaatttttcttattcttcaaatacttcccaaatttccttctttttttggtttatgactagaaagctgagatgatgaaagtgtgacttcatcctatgaaagtatatttttaccaaaactaatgtcttcatttggtacaaattataagcaaactgctagcttatttcacatttacacagcatgtcagcattgacccagatacagtataataatctttaataagagtattaaaatattttaaaatttctaaaagtttttgacaaaatttcttacgaaataattctcaacttaaacaatgtgtgtgactcatagctactccatgtaaaagatcagaactgcctcatagggtttcctaggctttaatcttgataggagcaagtcaccaggtctttctactgcagagctgctgggtggttttgaaccaccaacctttcaggttaattctaaccctaactctaaacttaattctaattttttcttgggattggatggtgtaaaaaatttcaaaagatattttttaattttaaaaaactttatgatactggtcacgcagtggttaaagtgctcaccaaaaggtcggtggttcaaacccaccagccgctccatggcagaaaggtgtggcagtctgcttccataaagatttacaaccttggaaaccccagaatcgactcaacaacaataggtttagtccaagtcagcaggataggcccaggtgatataatatgacatacttcagagttccactaccaactctgataaaactggtaatcaaattttgagatggttttacctgttgtagagccataacattacttttatcagcatcaagttgggcatttttaagtttctccctcaagttatgtagaatttgctgatattcaataatttcatcatctttagaagacaaaattaactagaaataaacaaaacaacatctgttacacaaaagaaaaactaataagccattcctcattaatggtgaataatatataccattagcatatttcaaggaaatacaagaaataaaatcctttgaagtaagaaagtatcagcaacttcaatctttcagtctttctaccttttgtgtttacaacctgaagtacaagtaaaaaatgtttgaaagtatatagcataaagctttgttttttaacaattcaatctttaaataatctcaaggtgtcaaaaccacttataaataagaagttataaatacgtctatacaaacacaaaaagttttatacaattgatttttatgacgaaaacactaaaatgccactgagaggcataaaatatattttgaatgaacggaaagccatcttattttcttagatagaaggactaaatattagaaagatgtcaattcaccctaaataaaacaataaacacaacacatacctaataaaagaatcaacaaatttttttcaaaatttttttgtttttaaagaactggataagttgtttcaaaaattcacataaaaaaatgttcataaggaaaagtctaaaaaaagaataatgggcaaagaagaatagcttttgcagatacttaaacatacaatgattaagatggtaaaaaaaaaaaatcaatataacagaaaagagcccagatataatctcaaattcaataggaatatatatatatcctacatatatataataaaaataatttaaaaaagaccaaacccggtgccatcaagtcaattccgactcatagcgaccctacaggacagggaactgccctatagagcttccaaggagtgtctggtgaattcaaactgctgaccctttggttagcagctgtagatcttaaccactatggcaccaggtttccataataaaaacaaaaataaatagtattaggacagtagggtaacattctaccctactgcatccatagttcactctttataccaaagtcaattatatatgccgcaaagatttaaatgttaaagatgaaaccagaaggcaatataacatgagaaaatgattttacattcagatgcctttctaattatgacacaaaggccaaaaaccattaaaaaaaaaaaaattaactacacaatataaaaagaaacacctcatagaaaaaaaatcagtcaaaagaaaaatgagaaactgaaggaatacatttgcaatatatatcacaactacacttacagtaatttatcttacaaatatacttattcatgtgcagaatagttaatatataaggatattcattaaaaattatttctaagagcaaaaattgaaaatttttaaatgtcaatcaatagggagccaattaagtaaattacacatctacaaagaaaaattatagacactaaaaagaacaaagcaatactatatgtactaatataaaataactttaaaagacataagttttttttgaaaaaggaaagtgctgaagaataaacctaacatgctatctttcccccctcttccccaaattaaatacggtaaacacaactatttatgccaggagtcagcaaactggtctgcaggtcaaatctgacgtgccactatttttataaaattttattggaaatcagtctcactattttgttcatctgttgtctgtggttgctttcatgctatcacagcagagctgagtagtgcaacatggaccacgtggtccataaagcctaaaatatttactctttgactctttacagaaagtttgccaagccctgatcaatactacaggcctcatttctattgtcactgtttctgtttaaaatacaggttatctgagcttccagatgataactaatttcaaatagccaacaaaatttttgtcaggccaggtagaaatgatgactataaaactgctagctttcaaaaaaaatcagtagcacattcaccactatctcagaacccttttcaaaatatgcatccatcacaaccctagcttcctatagggtaaggccaggggatttggctggaaatggagtggtaaggaagaagataagtgtattttgaaaaggctttccaaatgattctgagagatcccttttcttacttccattcccattgaataccagtagtttgattaatttgtcatggaaagtagagctggaaaaactaaaattaaacctgaaactaatataactaatatataccagctaactgtgagttacattaaaaaaaactaaattttatttagaatcctctattttaggcaacagttatattttggacttaggtatcaaaagtttaaagttttactcattggtgttaaagagtttattcaactatatataggctcccagcccaacccagcccagtgccgtcgtaaataaggtagaggattatatttgatgccgttcttatgaagagtttttctagctaagacatataactgaaaaagaaaaagtctaataaaaatgccattaactagcataaggtctttgaaggaaactaagactatgaaacttaaacctaaaatacaaaacgataaagccattggatcagttgagaaaagcaccttccattcttccacttttgcattgacagctaccatgactggatcgtcttcttcgttttttgctttcaaaagttctgtgagctcctgcacctaaaaggcaataatcagttcaagaattgttgcaaattggtacaatatatacatatttataacatacatatattcacatatacattacatattcatatttattgagtagttttgtagtaagaggcaacatttcatggtttctgcatagagttgcataatcattttccattactagagaattatatttataaacagtattctatttttaaataagtttaattctacagaaatgagtaatttattggtttctatgatattaataactaatatcactaatatattataataataatatattattataatatatattacatataatatataccatattatatatagtatgttatataattatatattataatcatatttatatacattttatataattatgttaattatagtatatattatacatactatatgttatatataatacatataatataatatattatattattataattacaattaataattaacgatattaatagtgactttattttaaggtgtaaattaaacgttatggcccgtagaacttccaagtctctttaacagaaaatcccataattactagctttacaggactgctatcgatacattaattcaagtatcatctatattactcagatgacaggaattacaaggtgtgcgtgaggggattacagaaacacatttggacaaatctatcagtatggcaacacaatgcagtattaaaacaaaaatttgtatcctaaaaagttattttctagcttcaaataaatagtaatgagaccatatgacaccagtgtaaataaactattctaacactaattcttacttgaagtcgataatgctcattttctttttttaactgatccattacattatctgtctgatgcacaatagctttcattctattatagtcatcagtcatcttctccatttcctgtacagactcttctagattttttctcatttcttggttctgaacttcaattttctcattagcttctgttaaagcctaagaaagttaaaaatggttaaaataatttttttttgagaatctgaaatttaagctaaatgaaaattaaatggagtcataagtgcccccccatagcaaagagaattctttatatacctttagtatcaattagtattgacaaactaaatcaaactaaatgtcaagaaaattttacacaagaatctattctttttaaacaatgcccaagacaagcacatataaaaaggatgtataaagaattacaacttcaaagatgcaatttatttcctattttcttagtgcatagttgcagatttacactaagaattgaaatgtagggctaaaaaccagatttatgttataattaatgttttataagaatcattgctctgaactgactttttccattttacctgaatttcatccagatattgtacaagttcatagttttttttagacaactgtgatcggtagtcactgtcttctcctcttcttgataaaagtgtttctttctgtgaatctatttgtttctgatagtcaataatatcctgacgaagttgttcattctgtagatagaccaaacatgttctattaagaaactatcaaaagcaacaaaaattgtcctcctccaaatagtaatctcagaagatacctttaaaagcccaaggtttcaccaccctgaaaggctcacctttttcttcagacgtttgttctccagaaaaggacaggaaaagggtaattagaaatgagaaaggcaatatataattaaaaataataacataaactaaagaaagcaaaaatgagaaattttaaaaaatgaaatatattattttggataaccaaagaaagtaagaatagcaattatcagctaaaccaaagaacactctgattatgttaaaaagataagaactaccaggataaacaatggaaaaacattatttggctcagaaacaccaaataatcagagttcatatgatttcataagaaacagaaattttaaaagaatgctggataaaataagagaaataggaacagaaattcagacagataatcaattagtaaattaaagaatgccttacataaaaaacagaaagcaagatttacccatatagactaagagatgaatgtacttactggcctcacctttcaatatattttctatatccctgagccaaagtcatatcatacaatcagtccgtttaaaagatcagtcacttagaagattccagttctggttacaacacaaatttttgaaaacatttttaacaactatttttgttgaaccaccaccacaactaaaatttttttttaccaacctctcttcttaatttgctgttttcattttctgcctcctcatttcggagagccaactagaattgtaaaaaataaaataagataaaatttagcagcagttcaaaataaagccaggtttttagctactcaatttgaattttaaatcctctcaaataaagcatagaatatttaactaagaacttcatatctatctaaggcatgactaataagccacaacttcttgaacgctaattaagaattagaaaagatcaaacaagtttaaaaaaaatttttaaattctaagtaaaagacatagaaaaaaatctttttaaaaacctgaaaaactgagtagtttttctgtccaatacccttatcatttcactaatcttccatgtcaagtctagaatattttttgatctaattatgtattaaattatttagaaatataagtaagtatcccataatggttaaaaagcaatctgaaatcagactgcccctaggtttatatctcttgtccaccaatttctagtacagtgagctcatttaacttctcttaaattcagttttctcatctcacatattgacaaaaaactaaatacacacatatataaacaaaaaccaaacccactgctgttggatcactcatagtgacccggtaggatggagtagacctgtcccacggagtttccaaggctgtaaatctttatggaagcaaaatccccacggggtaactggtaggttcaaaccaacacacacacacactccttagtacaaagctcagtagatggaataactaaaaattatgaaaagatctttttcacatataaaagtcatttttgactgttatttccccaacaggaaaatattattataaccattatgatagtcttttcatctattctccaaaccccagtcctcttatgactttacattttcctcactttcccccttattcagagaatagacagaatcgcaatagtatacagctatggtggcgcagtgatttagagctctgctgctaaccaaaaagtctgcagaccaaattcaccagatgctccttggaaaccctggagccctagtggcacagtggttaagagcttagctgtcaaccaaaagctcagcagtttgaattcaccagccgccccctggaaaccccatggggcagttctaacctgtcctatagggttggtatgagtcagaattgacttgactgcaacgggtttgttttttttgttgttgttttaaaacatatttgaaagtctgtaataaccaaatacaatgtctgatccttcactggatcttggataatgatgtgggaggggggtgatgggcctatctaaggcatcgttaatagagaaaatctgattacaaacgagatactagataatagtactggctcagtattaaactttctgagtatgataattatatgtggttatgtagaatgcccttctgttttggagacatgctaaaatacttagctattaagcaccttggtatctttaattctcaaattgttcagcaaaaaatagagagaaatatacctatgtagaaggtacagaaagataaagcaaatgtggcacaatgttaacaaatagggtatatcagagtttgttttacttacaacctctacaaaggcatgaaatttttcaaaataataaaaagtttaaagttcataataaagtacaaagtgctatacaaatcttagaagtttgcctattattattatcatctgggaattaaaaaacattctcattgttttgaattgaaaagttttaacaagaacagggagtcatgaacttaactctgaagcattcttagtatcttaaacaccacactttctgtatgtttctccttcctatgcctgttcttcaaagaacctcttcctctttcattcctttattagacacttatcagagatccaccttataatcaatcactctggataatctcttctttcacagcttcagcagtatctatgctgatgacccaccaatcatgtcatccatgtaagtatctctcatgaattcatgatccacaggtatccttttttgggtatccccacagggacttaaatcttgacatgtgcaaaattgaaataataatctcagacttttccaaactcctcttgtgttccttcttagtaagtggcaccatctacccatccggtggcccaagccaaaaagttggtgggccctatttctccctctcctctcacaaccaatcaatcactacaaccaattgtgtctacatctctcacatatctctatgtctcttaaatccctcgtcattaattaagccatctttggcacttgcctaaattagaaaaaatgtctacttatcatctccccagctccagtctcagcccccttcaacccatcctctatgaagtaaacttttaaagtgtagatctgatcatgatatccttgtgttcaaaatttttcattggttccttttagaaaatggaccaaactcctcacaaactggcccttgcttagctccccagagaatgttgagtgttaaaattggaaggcagtactgtacagtagttaagagcacagactcctgggtctgattgtctggattcaaaaccaggttttaccacttattacctgtaaaactaaaggcaattactaactctttctgtatcacagtttcttcatctgttatatcaggcaaataacatcaacttcatacaataagtatcaaatgtagaacaatgatttaatgcatgtaaattacgtggcacataataaaccaaaaaaaaaacaaaacaaacctgctgatcttttgattaacagccaaacacttaaccactgtgccaccaggggctctggcacataataaggattccataaatgctagctattttattctatattccacccaagatgaataactgtagctccctgaatatactatatcaattcttacttctaggttttatcaaatactgttatcttccacccagaatgctttttctttaaccaccatgtataccccattctccctgcagggcaaactcctacttcaggtctcagattacagatcgcttcctgaacctcgagaatgatttaggtatcttaggcagagtatcccaatgtatcctgatacagcctcagagtatcttgttatctctatgttaacacttgttattaactatgaatacccttaagaagaagaatgtactagcccccagtatccctagtatctagcagttatctggcattctgtaaatatccagtaaaactaaatgattgtgtgatggttaaggttatgtgtcaacttggctaggtcacgattctcagtggtttggcagatattacataatcatcttcattttgtgacctgatgtgagcagccaatcagttgaaaagggagtttccttggagttgtggcctgcatccaatatatatggatgttgtggcaaagcttgctttctctcgctcctgcatttgatcctacatttgcttcatcgtcctctgacttctggttcttgagatgtaagccagctgcctgccgcctgacctgcagattttaggtctgtcagcccctgctaccacatgagtcaggagaaactgccaacctgccacctaatccacagatttgggacttagcagcctgcacaactgcatgagcgatttccttgaaataaattcaaacgtatttatgcagtcatggtggtacaatgcctaagagttcagctgctaaccaaaaggtcggaagttcaaatataccagctgttccttagaaaccatacagggcagtcctattctgtcctatagggttgctataagtcaaaataaacttgatggcaatgggtttattttttttatttatttttggttcatatatatttatatatacgtttcactagttttgctcctctagagaacccagcttaagacagactggttaagggcaaggtaggaattgccaaagcaactcatacccacattccatctgaaggaaactagcagaagaaaggcatataggacatatattcaagtataaaagtagtagtctaagacatgaatagacagggtagctgtgattcatcacgggtgtgtggtatgaatgatgagaaatcgactgacacatggactagacagatgacgatagtacagaaaaccacatacatatccccctatgaaattctgttactgtatatgatacgttggaaatttaatgattactaagaaatctataggtccattaggttttgctgagtcaatgaaggaaaccctggtggcgtagtggttaagtgcaacggctgctaacaaaaaggctggcagttcgaatccaccaggcactccttggaaactcattggggcagttctaccctgtcctatagggttgctatgagtcggaatcaactcaatggcaatgggtacaggtacggagtgaacaaaacagacaatcctctaagagctaactcctaaccttcaggtggcattaacccatactttttctactacaaaaactgagaataaaaatgagatagttcatttttatatcagttttctaaatcatagaacaaaatttatcaagaatgggaatacttctcctcacaaatcaatttatgataccaaaacaaaaccaaatccattgtcgttaagtcaattttgactcatagcaaccctataggacagaatagaaccgccccagagagtttccaaggagcacctggtggattcgaactgctgaccttttggttagcagccgaagcacgtacccactatgctatcagggtttcccaatttatgatagatactgtttatatggaaaccctggtggcgtagtggttaagtgctacggctgctaaccaaagggtcggcagttcgaatcctccaggtgctccttggaaactctatggggcggctctactctgccctatagggtcgctgtgagtcggaattgactcggcagcactgggtttggtttttttttttggtactctttatatgccaacatttatctcacatacactgttgtttatttagttaatatttattaccctctgtttctgagagaacaacaaacaatataaaactataagtacctcataaaacagtaacctaaaagacacaaaggtagaagaagcttctaggcaccaaattttgtactaagtttaatggcagctaagacaagataaacatattattttctgataggaaatttacctacagaccaatttttcctcaaactgaatttaagagaacattgtacaaattattttacaaattacaaggaataatataagaggtaataaaaaaaaaactatgcttatgtaaaagataaaacgtcatgattttaaatatcaatgagtttacaaaatcctggcattaactaaatttttcaaaaacccatatattacaaaaagtaaggtatacccaaaaataaggaatttcattgactagtattgaatacggagccctggtggtgtactgactaagagcttggctgctaaccgaaaggttggtagttcaaatccaccagccactccttggaaaccctatggggcagttctattctgtcctagagagtcgctttgagtcagaactgactcaatggtacctaacaacaacaacagtatagaaaactcattaaaacatgaatttctaaatctactattagtataaagatattaatacaaataaatacaacttttcaccccaaaataactgcttacttatgaatgtctattaatttcttcagaaaaagaacatactcgagaccaataatcaagacccaagcatgaattttatacacgctattctaatgtcctaagaaaaatgtacctcgaaatataaactctccaagtcatactcaccagaagcacctggtctattatgttttgaagatataatgataaagaatgatataaaaccttagagataagtgtagcacacaaacataaaaattgatactattgcataactaggagtactatttaggtaacttgaacagataagagttattaaaaaaaaatgtgccttacttgttcattaactttcttctctttatccagttccttttccatgtcctccaattctctatctttttgttccaattgcttttcaagttggcgaatttcatcacgtaaaaaccgagtatcacgtccacctgcagcctgctgcgccatcttaatgtaacagaacaaaaatataaatgaattccattctatttggagattcacgtgaatcaacaacaagcagataactatcttgactttaaatttttattatacttcagcagcaaatgtttaaaatgatattagtttaatgaccattttttaaaatttagcttattttagctttagttcaaaggctgacaacctcctaagtttgtcctgaatcacccagagctacaaagaattgactgaccatcaatcactcaggctcagctatagtcactgagccatagggaccacactaaatggcaaaggcttataatgtaggtaataaaatattaagacttttcctaagtctcaaagttctaaaaccagggtaaataccaacagagcctctgcctcagttactgaggcttttcagtctttttaacctgcccttcctccaccactcacatctaccttcatactagcactatttagaccagtgctattcaatagaactttctggactaatggatatgttctctgtgctgtgtccagtacagtagttagtagctacatttgaatattgagcttgaaatgtggctggtacagctgaaaaactgaattttaattttaattaatgtaaatgtaaatagccatagtggttagtactaccgtattggacagcctggttttttattttattttatttttttttaattctgtagtcaactaaatacattttacttaatattcttgttaatttgggccacagtccaaaacaccaaactctttggtcattcatttcacattcttatcttcaccctgtagctgtgttactcccctacgttaatccaacttttttcattctttccatctccttcaaaaagttcttcattatgctgtttaaaatcttccaagaaaaattattactttaaaacttcggcctctttacatcttccctcctatctccttgctttgactgttatttgactctttgaggatactgattcccttggaactctttcaaatggaagcccctcattctttcataccccacatatgacctagattcatcttgtgacttccagactatcattgcttcaccattctgtaaaaactctagttgctttgaagctcatttaatatgcagctatctcaactggcgtagtggttaagtgctaaggctgctaaccaagaggttggcagtttgaatccgccaggcgctgcttggaaactctatggggcagttctactctgtcctatagggttgctatgagtcggaatcaactcgacggcagtgggtttggtttttggtttttgatcgcaactaactctacctactctagtcaaattcccagtcatttccacttcccaatcattcctcctcaaaattcactgacaattttggcaggtggttcacactcttccttccaaaaaaaaaaaaaacactgagtcacttttgaactgcccacagggtttccaaacagattgccctatctttcttcctatggaacagctgatgggtttgaactcatgacctttcagttaagtagccaagtgcttttaaccactgtaccaccagggcaccttccattaaaagccccactaaataatatccacatccacataactttcattctggtctcttttctttttacttgtttcttgaattccctcagcctcctaccctcatgcccacactgggaccttatccaagcaggaacattctattattcacactgtactggccacctgtcctctgtcctcacagatccctctaatcccttcattcctcttctccctccctaactttcagcatcaccatccccccctcccctccaattttgacttgtctattcagctaagattccataatcactacttcacttactttcccaccaacatcttcaactgccctacccttctaatcttctatgccagctgcctggctaaacactaatacagaatcaatccaacttcataattcatttaataaatatttactcagattgcttggcattttcctaggagctggctatacaatagataataggaaataacttgtccaagttcagagagtaaacaagttaaaaaaaaaatcaggatttgaactcaaatctaacttcagatcttctacactccctattctccattatatatatctcaagcctcactgccttcctttaaattttgaccgcgccatcttctacccttagtttagcagatggctttttttccaacatctcaatttccaggcactaaacctacaaacataaaagcttcagtacacatccattcttcttatcatcctattacaaacgaagagagttcatcctcctttcaaagactaattcatttgtgttcttcttaccttcctaccttttcaagaatctcaatgcattcggttcctcaacaacacacttgtcttttgtctcttggctttctcaaaatctacttcttctaccatactggtctgtcactattccccaaattcccaccctaacttacttcaccccagttggtaacccttccatatatctctctagactgtaggctccatgaggtcattgactatttttttgttcacaattggatgctcaatccttagtagaattaaaggcatctataagaggcgtgcaatataaatactgaacaaataaccattaacacaatgtcatcttaggattttttttcagccaacaacaatcaaaagacttaaacgcaataattcaaaataataaaattaatgacaattatacggaataaaaaaggatatacctccagttcgttttccagtttcatcaatttactttttaattgattttctattaaataaaccaagaaaacatttcagttggttagatttacctcgaattaaacttccaaatgaatttcaataaaataataaaattaactcttttaaaatttaaaattctatatggatggtgataacaaagtaacataaaagtaactattgtgtactgtacccacaaaataggagttctagaaaattatctttaaaaataaatcaaacattcacattttatagaatatattagatttcattttctagtgcttactgaataaatggaatctattttttttttttttttttttatttaacatcatagttaacctctcttcccaggcacttaccaaattttgcttgctcttctccagctttttcaacttcttccaatgctagttctacttcttgggctttcatctaaacattaaaaaaaaaaaaaaaagttatttcagtgtcttaacactagctatagccactaagaataaggattttgttttatttaccatcctaattctcagtgccttcaatgcctaacacatagagacattcagtaattatttgttgaatgaatacattaatgattttcttattgaaaattatagtttcgagattcttaccagttggaaacacatttgagtcttctttttccctcaagatttatgtcagtattgcaactttttcctttacaaatttctttactacttcttttttcaatttcagttcttaattctaacccattgtgttatgtctagcttcagcatcaactcccttcaattcatcctatgtaccaaacccagtttatccttcctaaggtatatttttgcatcaattgtggttcaaaaatgtctaatggctcctcattgttgatagtttaaaatatatctttaggtcttccatagcctataagaaactatccactaatgtctatttcctctacaatctgctacatgctttctgcggttatctccttcaatgtaaagaataagcatattatctattctgcctttatttacagtaacccccagctctagaatgcccttgccatcttaccatacccctctactttcctaagactagttattatcctttattagattccctcaaacttttaaatctctccccctcctaacaaattcccatagcagtcattgtctgcattattcatttgcacctcagcacatacttacttacctttaaacatactcattgtttcccctatacattcttttaggaacattacagtacgaaactgcaatgttttacacactgaaggctctcaatcacatggagatatttttgagtggcaatttgttgtgttgttgtatgccatcgagttgattctgactcatagcaatttagatttcacaaagtactttcacaaagatcatcttatttaagatagtaaaaagtattaagcctattggatacaaaccttcattagggactgagtaactctgaaaagatgtatcaagctttcttgactttcgctttttatttcatttatttccacctaagtaaacaaacaaacaactttaacccttaatcaaaatacaagaactcttccggttgcaccattcaatgatgtcagtgacaacttaatcatacacatacataaacaacaaaaaaaaatgtacatccatgtgttatttatcaattaagcaccttggatagagaaatcaacaaattatctgccagttcttcttgccgaggcaggtcatctgggtcaactttcattatatctttccagtttatattaggtggcat

SEQ ID NO: 5 - DNA, 1581 bp, synthetic construct
  source 1..1581: mol_type = other DNA
atggtctccagacagcagtacatccgaagcgggtcccagggctttagcagtggctcagccattgtgggtgggggcagaagggctgccttcagctccatctctgtgtctgggggtgcaggccgctgctcctctgggggctttggcagcaggagcctctacaacctcggggggaacaagagcacctccatcagcgtggctgggggccggcaaggcgctggctttgggggtggagttttcggagctggcagctttggtgctggtttcggtgctggcagctttggtggtggatttggaggctccttcaacagtcggggtggtcctggctttcccgtctgccccgctggggggattcaagaggtcaccatcaaccagagtctgctgaccccactccacgtggagattgatcccgagattcagaagattcggaccgaggagagggagcagatcaagaccctcaacaacaagtttgcctccttcattgacaaggtgcggttcttagagcaacagaacaaggtcctggagaccaaatggaaactccttcagcagcagacgaccaccacatccagcaaaaaccttgagcccttctttgagagctatcttagtgtcctgaggaagcagctggatggcttgatcaacgacaaaggacgacttcagtctgaactgaaggctatgcaggacagtgtggaggactttaagaccaagtatgaaggtgagatcaacaaacgcacaactgctgagaatgactttgttgtccttaagaaggatgtggatgctgcctacatgaacaaggtggaactggaagccaaggtggaggcccttaatgatgagatcaatttcctgagggtcttgtatgatgcggagctgtcccagatgcagacccacttcagcgacacgtctgtggtggtgtccatggacaacaaccgctctctggacctggacagcatcattgctgaggtccgtgctcaatatgaggagatcgcccagaagagcaaggctgaggccgaggccctgtaccagaccaaggtacagcagctccagatttcagttgaccaacatggtgacaacctgaaaatcacaaagagtgagatagcagagctcaaccgaatgatccagaggctgcgggcagagattgagaacgtcaagaagcagtgccagactctgcaggcatctgtggctgacgcagagcagcgtggggaattggccctcaaagacgcctatagcaagcggacagaactggaggctgctctgcagaaggccaaggaggagctggcccggatgctgcgagagtaccaggagctcatgagcgtgaagctggccctggacattgagatcgccacctaccgcaaactgctggagggcgaggagtacagaatgtctggagaatgccagagtgcagtgagcatctccgtggtcggcggtggtgtcagtgctggcagcattggtggagggcttagccggagcggtggctttggctctggctctggctctggaagtggctttgggtttggtggcggagtcagtggcagcactggcagcaagatcatctctactactaccctgaccaagagatcccaccgatag

SEQ ID NO: 6 - DNA, 23882 bp, synthetic construct
  source 1..23882: mol_type = other DNA
ctagcctgtggttggagggagtcccacatagtcctcaaaccctggctgcagtggggatgggcctccagggggtccactggccagcccaggacaggagctggggtcctggtgagaggggcgacccagagggggtgtcagggtgccagacagggcctctgggggtgggtcgaacaccaaatctgcagtggtgacatagccagaggccacgacactgtcctgggggctcccagcaccagcgggcagagcagatgggctatcctttgggtcgcatgcacccaccatgggcccaggtagaggaggggcagggcctttccctgactgcggggagaagctcccctcagaccctgggctgggcaacccctccacatccgtgacccagctctgccccatggcctgggccagcagaaccagttgcacctgtcccccagagggcagacacaggtactccagggaccctggtggcagtggcttctcactcctgcccacatcaggggacgtcagctgaccccagaagtcaggcagggagcggctatggggtagcctaaggtaggggccattgaaattgaagccagaagcctggcttttgggcatgcctgagggtggggacaggccgggctgggggctcaggggctgctccatgggctccaaggcagctggagtcacgtgaggtccagacggtgagtcagaggcttccttggggttctctgtggtgagtggtaacacctcgctgtccccacagtgttcagggcacatcctgtcaggagagcagagattggccattggcctccgatgggcatggaaggggagaaggtggaaggggcagggccatgagaaggctgggtcacgtgggagaagacaactgacacccacaccatcttccctgtcctcgagggctctgcatttgcttcaagttcttccttccatcttatttgcccctctctgcccccctgtcggtgacagaggaatgccatctcagcacctcgtctgatcatctgtctcttgctcagtctgtcatgaaatcagcatatcagggtcccagtggccttcctgagccacctcccccatcccaaccagcccaggggtgataggatctcaggctgttccttgcatagcagttcttcctgctagactgagttgtccactgtcttcctcggtccaggacctccacctgctattgagctctcctgctccccaaggcagggctggtgggctggtggtctctgcctccctcacagccaagggccagagccctgcctagaaggggcacgtagtcaatgtgtgctgaatgaatgaatgagtgaaggaaggaaggaggttaccttcctgttgaaggtctccaacggtgtcccccgaagctgcttgaaacggagtgcctataaccaaactcatgcttttctgcccttcccccaccatgccccatcacaagccccccaaacctgcctcctatgtcctcatgcaatgacctccatcctccccagcaggtgtgtattaagcagtatgcaaggtacacacaggcctatttgtgtttacttgctaatctgtagtgcacaatttcacatgggttccattacatctttgatgtggtgaaaacagatgaaattgtgcactacagcttagcaagtaggcacaagtaagcccatgcgtacctttggtattgggtaatctgtcccaactccccagcacccagaccaggaagctccatcatcttcaactccttcgtctctctcaccccttgtaaaataaatgaccacgtcccgcctcccattctgaagcctcagcaatccctccttttctgtccaccccccagcggacactaaaccagccactgtcttctctaccctgaaaactgaagcagcctctatgccctgccatcccaggctacccctctctgcgccctgtccctttctcagacacagctctgagcatcacaccctgtagcgctcctgcggctctgggaagatgtcctggcccagctccagggcccacttttcggcctcacatcatgtctttctcatagccaaacccatccatagtcaaaccctgtcctccactgagtcccctgggcttgctcacgggctcctctcctggtgaactgtgagcacctccctagaaggcctcccctggctgcagaaaacccctcccttccctcagcgcctccttccccagtcccagtgcctgctccccctcccaccttgagctgaacccattgccattgagttgattcccacgcatagcaaccctataggacagagtagaactgccccatagggtttccgaggagcagctggtggattcgaactgccgaccttttggttagcagctgaactcaaagggcagttatttctccctacccagtacaccttgagccccgggagggccagggcagcccctccttcacctctgcgcccccaggcctggcaggcagcaggtctcggcacatggccctcctttccttccttgccgtcctcttgtaacaactacagtctttcacacatttgtctcacctgagcctccacctgcctgtaaggtagggcagagaggcccaagttactctcccccttccaggcaaagtaagaaaaggcaggactgggaggtgaaaaaaggtctctgggatagtcaggcacctattccaggcacagggggaggtccagagtggaagtgcccctctggtctgaggccgctcatgtggcaggtttgtggtacactgggagagcccagtgctccagccgccaccagagctagaggagcaaggctcctccgagcttctgtcctgggtgcctgcagacctggacagagctgaacccatgggcacctgactgggggctgcagactgcaggagcagaacagaaaggtgagtgtcctccaggtcaaggggagggggactgcgagagctacacctagtctttagccctgaacttcctctaggggaggaatgttatttctacgagcaattaatccctggaaaggagagggactgaacatgcccacatgagtcagacctcaacacggcctcagggctgggccttgagtctgccccagagcttgaccttgaccgaaggaaagacggctttgagagtgtggccatgctcgtgtctggtagcagggagggctggggccagggccttgcctggagtccaacccccttcccttgacctgctccaccaagtaggcttatgaaggcccagcagtaataagaagggactctcctatctcctctcttcttcctcctcttccaccttcttcaccgtctaatcagaaatagagcataaagccatggactctacagagttgttctgagtaagaagcaagacaccctacatacacctgctcagctcatggccagcccaggacgtccttaacatgacaactgttgttatttttagcatcatcatcacagacagggcacactggcttctcccaacaatcctagaagctcggtattattgtctccatcttgaagataaattaataatgtaataaactgatccatttatggacaacaaggaaacagactcagagagcataaagcttaagctagaggtgggagacattgtatgtgacttcatggcatgcctgcctgctccctgcccttgtgaagcacgaatctctagcccagggctggcaagcagccctccatcatctggtctccaggggtaagacatactcactgcctcccaggctgacagcacaggggtcaggggatcccagagggtctggggatgatggtaatgtgcgtacagcccttcttggagtgacctgatcaccacccaccctgactccttgggtcatcacatgtcaccatgaggttgatggttttgtccttactttaaggttgaggagacagagtcagggcgcatcccagccagaaagcagaagatcccaggatcctggctgtaggactctgccaaggggcctccttctcaaaggaaagaccctcatacccagagcccctgcactaaagacagagccccctttccagcccccagcaccctaccccagcactccaccccagcaccccaccccagcaccccaccccagcaccccaccccagcacagaggtgcttcacctctctgaacctccctttccatgcctgcaccatggggacagtcacatctggcctgtcttgtctaccccacagtggccatggagacaggaggggaggccttgccagtggcaaacttgtcatcattactactccaaggactgtggtattcccgtcctcattgagggaggtcagtgtcacttccaagctccagaaaagacccaaagaacccctgcaccaaggggtttcccagtcgctcccccgacccttgaggccctgagggtatgcagccccttgcccactccactggacctggaggcctccacagtgtggagcttcctcaggcagcagggtgggaagacagcatctgctctagtccattgtcttagtcaagtctgttgtctggtattccactaacttagggctcaggaagttcttcctgatgtctaaatggagcgcctcctgctttagtcacttcacaatgagccaaggcagagccacttcatcagagtcccggttgtgcatgacaaggtcctcccctcccccattactccccagaagacaggagccaccccggggcccagactctcacccctccagctctgggatgaggctgtcacacggacacttgtgtaagaggcttctgctggtgaaggccaacgtgctgtctgggacccggagtcctgtacctccattctgggaagagaaagtacatgtcgttctgtgggtgtgaggggtccttgggaaggtgggacgggcagagggtggaggggaggtgaccagaggatgtcagtgagccttgggaacagtaagggtctcagcctcctcagggtgggcctggcctttcagaaaccagcaaagtgcagcccagggagaggccgtggcttccctgggtccccagagcaccagaggatgatgtccctgcccccatgctcatctcacctgaccctcctcacactggccatgagacccctccttgtgcaaagtggccctgccggcgctaaccagaggtctccatgaccatgtgctggtgtcacctgcctggtcattctggccaccgtaatctggccccgtctcaatacccactaccctcagggcatccaagaaggatcgtgtgtcccccttgaggttattacgtgtctgcttgtagcgaccctcccaccttttccacctggtaccacctgatccttcagaacccagctcagatgtcccatcctggtgacaccacgttgcctcccaccacccccacccacccctaggaggaggaaccctccttggagcccaccctgccggtggtccctgcctcagttctctgagtcctgttgcacagggagcccaggcaggcagggccccagctagttcatcttcagtacccgggaagggcagagctgaggtcccagaactaactcacatagcccctgtcccacacccaccactcacagcccacaggaaggaggaggtggggaccgagacgctggaggcagggcagaggaaacctccacctgcaccctgcatcctcccagccagaccctacctggaacaggtggctcttgccggggttagggattttctccttccactcctggttcagcctggaaagacaccagggaggtggcagctaccagagacctcagggccagctgctcccatgttcacgtacagaggggaaactgagaaccgggggggggggtgttcaaggcctcacaagggatctgtggcagagcagggactgaaggggccctgctgtgtgactccctgcgccctcggggtcctaggtagccccaccctgtccaccctccccatggagacccctacctgtaaccatggatgctgcagaagaagagggcaaggagcagggcgagagtgacgaggaccaggatgaatgccagggcccacacaggcagtacttccgggcacaaggaggaaagggcattaacatccaagtgggaaatgctgggggctcaggagggaaggggtggggtggggcacccccagaccctgccctgtgcaggcccagggctgcagaagctcactgtcatagtagcccagggagggtgccaggcccatgctaagaagaggagggttctggtctgaagccgacaatgctctacatgctgggaggcctgggagactgagagcctttccaggaggaagtggtgaaatgggaggcagtggctgcaaccccggcactcggggagcttcctgaaggaggtggcatgtaagagggcctcaagttgtggggaggatttggagagaccaaaaccaaaccaaaccaaacccactgccatggagtcaattctgactcataacaaccctataggacagggtaaaactgccccatagggtttccaaggctataatctttatggaagcagcctgccacatctttcccctacggagcagctagtgggttcagacagctgactttttggttagaagctaagccctttaaccactgtgccaccaaggttccattttggaaaggcaaagcaggaaaacacaggctgttagaggaaacagcatgtgaaaggcccatcaggagcccctggaggcttcctgctgtgcaggccctgagccccacataggctgggccacctcctgaactcccctcttctttcctcctttgggcgtggtgtccagctctcctttctgcctgagtgtggtcctctccctggggttcttcctctccataggtggctgaggccccttccggcacaaaccatccacaggactttatcatttatgtgtctcctggtggtcactctggggaaatgtgagtggccagcaagagcagcaaatacaggcaggagatgaagactaaggaatcagaccaaaaattccaagcctaagccccggtccatagctctcaatgtctttcctattatggtaacagggaactcttggtgagtgagcactggaacgtggctgctacaaagtctagtgaaaccatgggccacatttgtagaggcccaagttccaggctgagggaggtgagacagaggaacctgctatcctgggctctgctcagaaaccatgtggagtctgtgttgcacacaggtatcactttccaagcattgtcaggctaggtcaagaaaataaagcagggtcaccacatacaggtgagcaggtggttcactgcacaagggcaactgtataagaggcaagacgggcccgaattcagtctgagcctcccatgccaagcctggtgcctacggggctgtgtccacccaagaagaactaccaccgccggctgctgtggattccattctgactcacaacaaccccatgtgggtcagagtgggacagtgctccactggtttttcagtgactgatttttcagaagcagatccttggacctttcttttgagatgcctctgggtggacttgagcctccaaccttacagttagcagccccaaatgttaaccatttgcaccactcagggacttatccaaaacgatccattttcctaactccctttagtaaatgttagcagagcccgggcatggaattcagatcgagaagggcctgggcaacagatctccatgtccacacacacacgcacacacacacacagacgcacacacacacacacacgcacacacacacacaccctctgtgcagctgggctatcccaagagggcaagtggaggccaggagacctacctccctcggtgtcccaggagcgcgcctcactccactcactccagatcccactgaagatgccaggggtgggcttgaccctcaccctagcccagtacctggtggagggctccagccccgagagccacaggctgtatgtgttttgtaaagcctcagtcttggcctcctgtggatggagagtaaagaggagttggagcggatcctccaactccaacaccactgggcttcccctcgctcttggggaatctggttgtgtcccctaatctgtggcagtgttgttctccaccctgaccctggcaggagaccctgccccagacccactgattgtcagagcaacatcactacatatgacccacccatattacagatgacaacactgaggtccagagagccccaggttccaccatgcccaaccctcattttgaaatcctcagcccttcccaatcctctgttgggggcagtgtggacctccaggaacgtagtgtggtggactctgaccatgagaaaggtgttcaggagcccagggcccactcctaagtccacctctgactctcccccctcctgtcctcagtgtccccgtgttctacctgggtctcagctgattccatagattctggtctgggctccaaggagccccaggttttacacatgggccctgagggtggccccaggtcaggggagaggctaagccctgggccagggccccctgctccaccgggagccctctgctcttagcgctgcacgttgggattctggagaagagttccctggagaagggtccccagggctttacagcttttgaaaatcctctatcctggtggcctctcagcccctccctgccctgatggcctggccctcttgtaatgctgtgatgattttgactaagtcacgtcacctctctgaacctcagtttcttcaccaagaggtagacgggggcctgctgaccgtacagggtcatgatcacaccacagtggtgatctgactgcttggctgctggggccaggtgttgagtaggaggcagctgctctcctaggtgtgtctcattctcccaccctcaagtctgcccatgtccctcctctgccccagcctatcaccttccacaaggcggtgtccttcctgtactggacctcgaagttgggtgctaagtccttgtctgcttcccagtgcaggatgtagctgtccccgtccttggtcacattgagggttgggcagcccatctggactggagagagggacaccttcagggggtgatccagcttcaaatggaatattccagatgtacccaggtcctgccccaggtctctgtgcccccttcagggggtgacatctacctgggcctgggcagcccttctctgggaggtgctgagctagactgctgtctgtcaatagtgaggtagccatgtgactggttattcacggtggctgaagtacccaactgtataccttctcctctaaacaaacatgggcagagtgagagtcctcactctgatagcacctctcagccagtacacggtctggagaaggagcaatgagcagagttccagccctgggaaatgccccttctgcaccccccatcccagcctggtttatctgtgctgcttctcccgtggtttgccaggggtgggacaggacttggcacagactgcccatctagagggaggacaggaggtgcccaggggtatagggagggtaacaagtgcccaggggcaatctctaagttgttccccctcccccagtttcaagatgaatagaatggatagcggtgaggcgtcagcagaaactcctcccctcttcttgtccagctgcctcagttaggcgcctttcatatctatggcacctagatcatcattccacgtctcatttggtacccccttggacttgcaccctggagtaaatgcctctctctgtccgcctcctctgcgactctgaaggtaccactggggacacaccatccaggttctgaaaggctggtccccttgttaggacaggccggaccttgcagcaggattcagagctgacatgatgaacagaccagagaaaggctgtggccagctgaataacggctgcaaagatacccgagacctaatccctggagcctgtgaacgttacctcacacgacaaaagagacttcgcagatgtgactaaattaaggatgttgaggtgagattctcctggattatttgagtgggccctaaatgtaatcacagatttcctaataagagggaggcagagtgagatctgactacaagcagaggagaaggagatgcgatggaagcagagagagatttgaagacgattcactgctggctttaaagatggaggaaggggccatgagccaggaatgcaggaggctgctagaagtagggaaaggcaaggaaacggattcttcctagagcctctggacagaatatggcctcgccagcatcttggctgattttggacttctggcattcacaggagtcctggtggtacaatggttaagtgttgggctgctaaccaaaaggtcagcagttcaaatccacctgctgctccttggaaaccctatgggtcactgtgagtcccaatctacttggcagcaaggggtttggtttctatggcctccagaactgaaagaggagcagcaccaggccactgtgctttgttggctatagtagggacttttattctgtgcaggacagggcccttggaaggtttggggcagaggagaggtatgatttactgatgtgtgaccagaatcacatgagctgtgacattgagaataaattgaatgaagagcaagggtagaagtagggagaccagctgttgcaaggatccaggaggagttggtggcttaaaccaaggcataagcagaaagtagtcatattctaggtgtatttcagcgatagagatggcagaatttgctggtaaattggatgtggcatttgagagaaagatatgaaaagatgacaccaaggtttctagcctgagcaattgaagaaccaaaaaaccagaccaaaccagttgtcttcaagtcaattctgattcttagcaaccccgtgtgtgtcagagtagaactgtgctccatagggtcacctttcaaaagccgatcaccacgtctttcttccaaagcacttctagatggactcaaaccaccaaatgtttgcttgggagccaagcacttaaccatttttgctatccagagactcctaactaaagaacggacttgccatttagggagatggagaagctgctggaaagtgggtcaaggagacataagtgagcagacattttgaagcatgctaagtatacttcccatggcacttcccaacagagatgttgggaaggtaactgggaccaacccagtaatggagatcagaggttctagaaactgcacattgagaggaagacacagagaaaaaagaatgtgaggaaacttattttaagaattgttctggtggggaatcaccaggtggtaatatgtttttgagaaattcaagcagagattagaattacttttgttcatgtttggttgctacactgcgttttttggcagtgacagccatgaagacagagctgtgaggagccctgcacttactctggttacacaatgtcccagaaccacccacgcagaaggctgtgggcaaactcactgtgctctgagctctttatcaatttctcctccttctttggcttcacagagactgtgtactggtcatgggtctcggagtccagcacaggaatctggcaccggtgccgggtgtaggggctgctgagcttctctttcagcactggagagcattccttctccctgagaagcacggctgaggtgagggcaggaggaagaggaccctgggagggagaaggggactctaggatgagctgggatctctgctggggcccccagagagaggaggagactgccaagggcaaggcctggaagaggggaggggcactcactccgtgtcggggctgggcttgtagaagagggtgaaggggaccgagctggccaccacggacctcacatcccaggagcagctgagcacgtcagccccgttgaagaagcactggaggttctggggctgggcctcgtcccctggagggagacattccctcgatcattccctcattcatccctcggtcattcattctgtggctctcagtgagggccctcatggaggcatcatagagagatcatgagttttggggctcagagaccagggtgaaaagctcagctgacacctgtcagctgtgtgaccacagggggcagagtggattctttgaaccttcatcctctcctgtgtgaagtgggaagagtatctaagtgccagtgctttggggactaagcacaatagtgttggcgtgtcccgcacacagcagcctcattaaaacgtagctgctatgaatctggtcattactgtgttgtaaagagtactagtcagggcactctctgaagacaggcccctaagacacagccttgcctctgccaagttcagcagagatggggctggcctagggaagctgttgtacaaccgtgacatgtcacattcctggaatgacacaagagtggactctgagagccctcctgctccaggatctcatgatgacccaccctcccccagacaggcccacccgagctctgccagttacctggctgggagtcccagcagacctctgggctccacttgctgggctgccccgagagccctgtgcttggggcaagccgggtccgcacacgggccacgtaagtgctactgggcatgaggtgctccagccccaggatggcctgggaggagctggagtagagggtggaggcttcctgtggggatagaggagctggaggaggagagctgggccaggtccctgtgggctcaggggcagctggccagggctccgtacctcccaggagtcctggagccgccggtagaccagctcagactccaggtgcctctcagacagccagcggctctggaggcctccaaggtgcgccctccaggtcagcaggaagccgtccccagcatggctgacctgcaaatcctcgggcgcagggggctggactggagggggagaaagagaaggatgagtcagggtggggacgactgtagggcggctaacagccttcatggccttttgtgtgcacagaccagggctgcaggcccagcactgtctctactagctgagtggccctggcagacacttcacctccatggcctgtcacctgtgaacttgtggaatccagtgcgaacatgaatgaagctgtgcagacactctgcaaatgtaatgtaagctgagttagaggtgctgacaagctaaaacaagcctccatccgttctgggtctcccccactcaccgcattctgatctctatggcctccttcccagcagagggcactgtggcgcatgttactccctctcctgtgtccactctgcatctccctccccacctgctcactctccaaggtagctcacagtgccctggataagtgtctccttctctaagacccttcttgagtgcctccgtcccctggggtagaatctcatacttctctttttgtcccaccataaaaccaaaccaaacccatttgagtggattccaactgatagcaaccctgtaagatagagtagaactacctcatagggtttccaagggtataatctttacagaagcagactgccatatttttctcccatggagcacctggtgggttcaaactgaagaactttcatttagcagccaagcacttaaccactgggcagccagggctcctttgtcccactattgctgttgttgttagatgccgtcaagccagttctgactcagagtgactctatgcacaacagaacgaaacagtacctgctcctgtgctgtcctcatgatcattgctacgttggagcccatagctgcagccaccgtgtcagtccatctctttgaggagcttcctattttttgctcaccttgtactttcccaagtatgatgtccttctccagggactggtccctcctgagagcatgtccaaagcacatgaaacaaaatctcgccatcctggcttctaaggagcatcctggctatacttcttccaagacagacttgttcatttttctggcagccaaaggtatattcaatattctttaccaacaccataattcaaaggcatcaattcttttttgatcttccttattcgttgtccagctttcacatgcatatgtggtgattgaaaataccatggcttgggtcagccacaacttagtcctcaaagtggcatctttgcttttcaacacttgaaagaagtcttttgcagcagatttgcccaaatcagtatgtcatctgattacttgtgtgttgcttccaaggctattgattgtagatccaagtaaaatgaaatccttgacaacttcaaacttttctccatttattatgatgttgctcattggtccagttgtgaggatttttgttttctttatgttgaggtgtaatccatactgaaggctgtggactttgatcttcatcactgagtgcttcaagtcctctccacttccagcaagcaaggttgtatcatctgcatatcacaggttgttaatgagtctccctccaatcctgatgccccgttcttcttcatatagtctggcttctcggattatttgctcagcatacaggttgaataagcatggtgaagggacacaatcctgaagcatactttacctgatttcaaaccccacagtatcctcttgttctgttcgaactactgcctcttggtctatgcacagattttgcagaagcataattaagagttctggaattcctattcttcgcaaagttatccgtaacttgttatattccacacagtcaaatgtctttgcatagtcaacaaaacataggtaaatatctttctggtactctctgctttcagccaaggtccacctgacatcagcagtgatacccctcattccgtgtccccttctgaatctgtctagaatttctggcagctccttgttgacgtactgctgcatccttttttgaatgatcttcagcaaaattttacttcgtgtgatgttaacgatattgttcaataattttcacattctcttgaatcacttttctttggacacaaatatacatctcttccagttggttggccaggtagctgtcttctaaatttcttggcatacactagtgagtgcctccagttgccacatccatttgttgaaacatctcaattggtattccgccaacacctggagacttgtttttctacaatgccttcagggcagcttagacttcttccttcggtaccatcagttcttgatcatatgctacctcctgaaatggttgaatctttttgtacagtgactctctgtattctttccatcttcttttgatgcttcctgtgtcattcaatattttggcaccagaatccttcaatattgcaactcaaggcttgaattttttcttcagttctttcagcttgagaaatgacaagcatgttcttcccttttggttttctaactccaggtctttgcacatttcattataatacttttctttgtcttctcaagctgccttttggaatctgttcagctcttttacttcatcatttcttccattcactttagctgctctacattcaagaggaagtttcagagtctcttccaacatccattttggtcttttctttcttttctgtctttttaatgaccttttgctttcttcatatgtgatgtccttgatgtcaccccacaactcatctggtcttcagccattagtgttcaatgggtcaatctattcttgggatgctttctaaattcaggtgggatatcctcaaagttgtattttggctatcatgaacttgtttaaattttcttcagcttcaaaatgaacttcttatgagctctgttctgcagttggcccctggccttgttctgacagatgatactaaacttcttcattgtctcttcccacagatgttgttggtttgattcctgtgtatttcatccagtgaggtccatgtgtatatttgccgtttatgtggttggggaaaaaggtatttgcaatgaataagtcattagtcttgtaaaattctatcatgcaacctccagcatcgtttctatcatcaaggtcatattttccaactactaacccttctttgtttccaactttcacattccaatcaccaggttgttgcatcttgtttgcatgtttggtcaatttcagactgcagaaattggtaaaaatctttaattttcttatatttgccattagtagttagtgtataaatttgaataatactcatattaaccggtattccttgtagatgtatggatattgtcctatcgctgacagcattgtgcaaaccccagtggtgtagtggttaagagctatggctgctaaccaaaagcctggcagtttgaatccaccagccactccttggaagctgtatggggcagttctactctgtccgatagcttgctatgagttggaatcaactcgactgcaaacggttttggttttcacagcatcatacttcagcatagatcttgaaatgttctttttgatgatgaatgggacaccattcctcttcaatttgttattctcagcatagtagactatatgatattccaattcaaaatggccagtaccagttcactaatacctatgatatcgatctttacgcatccaatttcatttttgatgacttccaattttcctagatttatacttcatacattccatgttctgattattaatggatgtttgcagctgtttcttctcattttgagttgtaccacaacagcagatgaaggtcccgaaagctttactccatccatgtcattaaggtcagctctactttgaggaggcagctcttccttagtggtattttgagcaccttccaacctgaggggctcatcttccagcactgtatcagacagtgttccgctgctattcataaggttttcgctgactagttatttagaagaataatgccacatccttctttctggtctgtcttagtctggaagctccactgaaacctgtccgctaatggtcactctgctgatatttgaaataccagtggcacagcttccaacatcacagcaatatgcaagccaccacagtacgacaaacggacagacaagtggtggtgtcccgctatagcccattttaaatccttccaccagggtcctatcacatcatgatggatttatgtgtctccatgtctgtctctgcaagtagatgatgagttcgtggaaggctgggtattatatgcccgtctctgtccctgtggcctgcaatgtagtggctcagggtattttgggggcaatggtgaatgaatgaatatatgcaagtaacctttagggacttctcatgaaatcattctattaatccaaagcaaatgtgtatctcctgcaatctactgggttaggcaagaagatgcattcatggaatgatacggttcatgccttcctgaagcttccatgtctgattgctgagggatgactttcagaccccccaaaattcagtatgagcacatataagatgtaaatattctatgctggccttaggctatggaatgtaggagctggagcccctcagaaatccagaaacccagaatggcaagtgcacagcacacaatccaccccctcccaacccacacccacaacaggcatcagtaatcaatcattgcactcttagcctctgaaatccttctcagcacagagccccaggaaactaataccaattcaacaaactgggaatcaactaagaacctactcatccaactgaaaagattttagtccacttatttcacagatggagaaactgatagaggaagtgaaatgtcccagatgttcaaatgtgggaacctgagagcagagcagatcaagtctgtcccctcccagcacctcatagccctcccaattcatctcacatcgttcctcaagtaaacatcaagttcattaatacttttaacataacgttaaaacatattaaacttgcaagccaactatttaaacttaaaaacactggaagaaataagggagacaaagcctgacagatataactatataaagacaaaaatctctctattttataaaaaataaccaaaccatgaaacaaaaggtaaagtgcaaaaaaaaaaaaaaaattttttttttgcccccaaattatagagaagggtttaatatctttacactgtaaaaggttaacacaaattcaaaagtcatcagataacacaagcaggaagttcacatacacacacaaaattcatgttggtaactgacatttgttgaatgctcaccatgagtcaggctcttgtcagagggctttacaggtatttacacaaatatatgtgtaggttactattggaatccccattttaagatgagaaaacaggtatagggacattaagtaacttgtccaggatcacacagctaataagggacaggctgggattgaaactcacagcaggttggctccagagtctgtgccctcaaccgctacaccaacagaaggtatatttcccaagcatcagcatcatacctgtctgttctgacatacactggctcaacagactctcctgtaggcatgcacacacacagaagaaacaacagaaaactttaacacaactaaattagcattcgcagggagactggagaaatcatagctttttaaaataatagactgctaaactaaataaaacaacactccccccccccaaaaaaaaaacacataaccatagttgatggaatttgaactatgagacccataattttgtttaaaatcccaataatgaatggaacactacaaatgatcatgtcatagaggtagacgttgaagataagggattcccctagaattgagagtaaatgggcaaaaagagggaaagttgaaaagttgagacctagtgttgagatcccagtgttcccacagccagaagcagagggcagagagaatcaagagcaggtatagcagagtgtagctacctacctgtcctcttccttcttggtaacagaagcccagcttttggcttctaaatagaaaaggctgtatttcctagactgtcttgcttctaggtgtaggaccatatgactaaatgttgtctaaggagatgtgagtggaagtattagatgcaccttccaaaaaggctgcttaaagagggctgactcagatgggagaggttccttctgcccttcctccttcttcctgcctgtaacttggacatgatggctggagtgccagcagccttcttggatcttaaggttacttccaggatggaagccatatgcaaaaatggtgaaacagaatgacaggagcctggatccctcatgtcactggagcaactacaccagcctgagattgcctacttctggacattttatgtgagggagaaataagcttctgttgtttaagccactgttgtttggggattttccctgcccagcccaacagatacacttggaaataacagaaggaaacttcacggggcttaagaggagataacagtctaaaaactgaaaagcaagattcacgttttaaagtgccatactcagtcacataaaagttggtgaaatttcagtctaagaactcctagaagcttacagaaggaaacaaatcatggcaacagcaaaacaggttaccttcaacagaacaagggtcaagttgacacgagatttctcacgagtgaccttgaactctaatagatagcgatcttcaaaatactaagggaaaatatgcttaaacctagaatcataaaaagttatatgttccttaaagatcaagagaaagaaagcaaagctacacattttgattatataaggacaaggaaaagttttcagatcttttctgaaaaaaattactgtaggatgcacttcagataaaaaaaaaatctaagaaagaaaagtacaatgttggaatcagtgatgaacaaagaaaccagtaacagccataaaaacacccatagtcaagcaaaaaagaattgttactgcataaagtaaaaataaaatacacaataacaataaggaactaaaacccagatgattttaaggtgggttgttgttgctgtgtgcggtcaagtcaattctgacgcacagcgaccctatagaacagagtaaaactcccctataaggtttcctaggctgtaaatctttatgggggaagagagccaggtcttttctcccacggggcctctggtaagtttgaaatgctgacttttcgaagcagctgagtgcttaatcattgcgccatcaggactctttttagtatagaagtggagtggaaattgaaggaagcctgtcttgatcccttaggggctccttgccttctgcccttccacaggacgcacacctgcctcaggtaaattatcgcagctgactgtatctactgtgtccctgtttgcggcctctccactctgatctccattcacatccatcaaacatatgctttgaagcgttgtttgaaatccatttgggacagcctaattctgattccagtcttcaagacaacagctttaggtgaaaagaggcaggaagcaaaggcctgagcctactccctgtcagacacttacaagggacaataggtggcccagtgtttgcatcaaaggtgctaaagtcatacgatcctgggttccagtctcatctctttctccaacacctgagtgaccttgggaaagtcactttcctctctgtcccaatttcatcatcagtcaaatggcggtcataatagcacataacttggcattgtttgagaattaaataagagttggcagtgtctactaaaagccagccacctgcatggtttttgccacatcaacataaacttttataatcatagccatttaaataaaaacagactgcttttcattctaagcaataatttccctgaatccatgaatttgaaatgctggttatatttctttctaatatacagtcaaatataacctaactaaaccaaaaaaccaaagccgtagccattgagtcgattccaactcatagtgaccctgtaggacagagtagaactgccccacagggtttccaaagagcagctggtgaattcaaactgccgacttttggttagcagtcgagctcttaaccactacaccactagggctctgtaacttaactacttctataaaaatgctcatctacacccactcaagaccagtcatcatttcatgtgctgcaaggacacacaaggacactgtgggggccactcagcaagagcaggaaggtgctaagctccatctgcgaagtgcaggaaactctcaatatgtctgaccaaccactgccgttattgctcagtggtgagactttgggaaagtcactttacttctctgggcttcagtgcttcatctctaaaatgggttgttgcagaagttggctgtgaacacattgatgaatgagttttgcaagctgtaaagtttctacctggatagggaggatggctgttctttaaggaaaggcttcagtgctggaaaccaatggcctggcaggtggtgggagtagccaggggtagtaggaggtccctttggctagaacctcctcaagctgtagctgctccaaagcctccatggtgagaccatctcctcttccctcaagagacccaaacccaaccccaagacagtatctccacctctggaagaccccaactccctggtctacctcctaaacccaagccacccctggtgaccactgtccagacaggtgaccaagccctggccagggaccccaggccctcaccatgctgggtcagagtaacggtgagctgggcacccagaggcctgtctggttggaaggagaagtggtcattgtcaccagtgacgaagaaactgtgagagatgacacatcttctggacacacagggtggagaagggcagtctggccagggcatgttgtcgctgagatcacagggcactggctctggagggtaactgccaggagaggacacacattagcccagagtaaatcagaatcactgttcaacaaatgcttacagagcggttcctacgtgccagatcatccgggggcaggggccaggcagtgagcaaaacatgcacgagtccccgcgcatggagctgacatcctggtgggaggagacacacattagacatgaaagatgtagcgtgtcagatggagaaaacgttgttcagacaaatacggcagaggagatgtgtgggtttgaagggctgagggagcaacttggaaaaggggttcagggaaggcttcaagagtgggtaactttagagctaattccaagactaagccctggggtatcctgcctttcagaatcagggggtggaaggtacgggccttcagagccgtgaggtaagaaatttctgttcttataagcccgagttagcaatacttagttacaggcaatctaggaaactagaactgggtggctgggggatttctggaggcttctgttgcctcctgcagtaggaagcaggtcacaggctgaaggcagggatgggggtgtggtagtgggggtcagaggaaggtggagggggtgagctggaggcatacagaaagcaggagagagaaagtgaaatgggggccttgtggggtgtagcagaggccactcctccccaggggcagcctccgtggggagggtctccccacccagagattctatccagacatttcatcatcactcttatggctgatttggactctcaccgacatcccaaaatgatgggagctccttccccaacagtgaagcatgggagacatgacgtgggaaaagggcaaaccccacacagggaggtgggaaggccctaggaggacatggagcctggtcccttaagtttctcagaaaagaggaatctgcccagctttgacactcatcctccatgctgccaggagaggggtcttggtttcctcatctgtgaactgggtgtcctctcctgccttgcccccctcatctgagaactgagcaccctctcctgcctgcccccttcgtctgtgaactgggaaccctctccaaccctgtgcccttcatctgagaactgggcaccctctcctgccctgcccgcctcacagccagtagaactaagataaggcaggtggaatgcctggaatgggagattatcaccatcaacaataacaacagtaataatacactcccagaagcctgaacagcagataccagccttaggcctggttggcagcctgcttgctagaaccagagctcctggcagtctccttgtgcttggtccgctgggcaccccccacccctaggctgaccctggacctctcttcactctacacgccccaccggggtcactcacttgtcccgccagcgatagagggtcacattgatgtaccgctgggcagcctcggtgtccgcccacctgcactggacgcggctggtgtagtcgttatagcagcgcaggctctgcagggggacagcctctgaccggggagaggcaggaggggtcatccctccccccctccatgtgtcccttgtctctcccgtcagctgtggtgtctgttctgtccagcctgatgtttagaaaagggaatttggttcccacccttaaagagaagccaagttctgtaagaactctttgcgtgggggttcattctgctccaagagccagagggtcaccccagcagggcttccgaacatcaggaggaggttgctggggacaaagccaggaaaagaatccaggcagagggcctggcaggagcaaaggcacagaggtgggaaatgcgggaggctgctcagagcagcagagtgtctggtgcagaaggaggagacagaggaaagtctggagcagcccacctggaggtcagaggctcaaaagctacactgagggctgagggcagagaagcctcagatagacttactgggagaccaggcaaaggatagcaggagggtgcaggcagagggagaggagggaaggcggccagggtggaacagggagagaaggaatgaaggcaagggagctgggaggcaggacaggagccactggtgcctctgggggcttccttgggaatacaatggaggggtggccttagcagtggagtccagaagtgaggaggggccaggggatagagtggaagggtggcctcacccacagggcccagcagtgaggagggggggcaagcaaagggagggagcaattggactcaccttggatccccgccatgctgcaaccccagcacagagccaataggacgatggagagcagccaccgagtcagcgccat

SEQ ID NO: 7 - DNA, 1022391 bp, synthetic construct
  source 1..1022391: mol_type = other DNA
ttatatatcatttgaaccttggcttgcacaggaagagaagctatcatataaagagtcactcaaagattccatattgtctaccccaggcctatctgagctactcaaagatgcctcttcattttttccttttccttctttttgtccttcaaccttgctcagagagttcttctctttttctaataaagtcatggtattgctgttaaatttattgaacgactccagggaaattttagataatctattctcaggatcttcttttgtttcttcaacttgtttcaatttctgcaataaaaaagaggaaaatattagaaacatatttctttggaaaatcaagttatcctatccaatattcaattattgtctgtataaagtgcagcttaaagggatagagaggacctataagtctttaactacctctagaataattaaatgtaataataaagccaattttagggatcaatcaagactttaatcattttactgagataaattggtcccaatttgcaaaccagttaagtgccacttaatttcattttaaatggatccatttgaaatttgttcaggtaaagtgccttatctttcttaaccgaagtttcaaacttctccatttctttactaagtgttccttgtactatttctaaatatagatagggattgaatttcagccagaagttagcagttctatggaaaaaaggcataaaacctcttaagttgccataaaatttaagaccttgttaaaggtgtcagaagcattgtcatgcttatattttgtcccttcagacgactcaagacatttaaaagagatcttaagttctggggtgtagcttccaaaaggctcaagggcttcaaactcataataagagttcaggctgttaaccaaaaggtccgcagtcggaattcgccagcgggtccttggaaaccctatggggcagttctactctgtcctatatggtcgctatgagtctgatacaactccatagcaatgggtttgtttgtttggttcactccagggggttcttgtaatattgtaataccaatttaaacaagggtatttataggatgttgttggtgctctctaggactttataaaatactgcagccatattcaataattactgtaggtaaaccctgtaaacatgaatatgtgtatttgtttaactggcttctaaggtttaggtctggggagaggacagactgaggcacagcagcagagagcaatgagaagtatgcagatgttatagtcgctgagacttctctctcactccgtcggaatttctatttcactcaaggataaagtcggtagaggactcagagataataacaacccactgccgtggagctggttctgactcatagcgactccaccgggtttctgaagctgtacatcgctacagaagcagactgccacatcttttctcgtggagccgctggtggtttcgaaccgccggccttttggttagcagtcaatggctttaaccactgcgccagcagagctccatttattaaatctccactgtgtagaagacacttaacatattttatctgtaaccctcttcacaaacctgcaggttacacattcccattttacagatcaggagagccaggctcagagtgatatttatttgcacagagttgtccagcaagtgacagagaatgggattttaactcctgtctgctgtccatgcccttgttattttcactacaccatgcatttatgtaataaaggacaaagtgtcttgtatacttttgttttccttctgctacccaaatattctacttaaataacttgccaaactaccaccactgctgctgcccaaggcactcccccctgcaggcccacctcccatcattacgatggatgtacaaaggtacgacgaagaaactgggtattgatcagggaaaaaagagacacagcctacaaatccatagcctatgaattctcacatgctaaatatttaatagaaagagaagagagaaatggaagtggatggttaaggctcccaagagtaggctgaggtccagtttctctctccgttatgggaaatggcataattctatgggaatatctgaaaatcctccttggcccagtgcttatttcattatcctattaaggtacaagagcattactcactgagctaaccttcaatctcaaatggctaccttgaaaccagaggccagccgaggaacagctgattatagaaaagtggctccataagtaggaataagtccacgcaagagcctttttatactgtgccaatgcttaagcattcctttttcaagaattacgaagcgtaatattaaaaatatatggagaaagtaggaaatgcttgtgagtcgctggatagtgcaaatggttaagcacttgactactagctaaaaggctggtggttggaacccacccagaggtcctcagaagagaggtctggtgtcatggattgaattatgtccctccacaaatgtgtgtatcaacttggctaggccatggttcctagtattctgtggttgtcctccatcttgtgattgaaattgtatgttaagaggattagggtgggattgtaacaccacccttactgaggtcatctccctgatccaatgtaaagggagtctccctgggatgtggcctgaaccaccatttatctctcaagagataaaaggagagggaagcaagcagagagttggggacctcttaccaccaagaaagcagcaccaggagcacagcatgtcctttggactcagggtccctgcacctgagaagctcctcaaccaggagaagattgaggacaaagaccttcctccagagccaacagagacagaaagacttcccctgagatgacaccctgaatttggactttcagcctcctttactgtgaggaaataaacttttctttgttaaagccatccacttgtggtgtttctgttatagcagcactagacgactaagacgcctggtgatctgcttccaaaagctcacaacctggaaaaccctatggagtagttgtactctgcacacatgggttctccatgagttggaatcgaccgtatggcaactaacaacaaaaacaaggaaaaatgctttgattataccagatgcagataaataaagggcattcgatgcacttttgtcctcaccggaatgccctctctccttcagtgaagaaccacaaacgtttcccttgcctatgtctggtctatgtgaatctcaattccattcaacagacactttctggaaaagctatgaggaggcaggtggaaggttttggtggtgaggacacacagctgaataaaattgtgtcttagaggggagacgttcaggccctggaggcagatgggcctacgcgagaatctcagctgtgccctttcactggctgtgtggggtgtccatgtgctgtcttccacacgtgtaaaatggtgctaagacacacttttctttcagactgaagtattggaaataaagtgtcttaggcccctgacccatggtaaataatattaagacagtatccttattctagaaatgtggctcccaatgtgtacctcagcatcacagggagcttgttagaaatgcaaattcttgggcccacccagacctgttgttgttgttgttaggtgccatcaagttgattttgactcatagtgaccccatgtgacagcagttctacttcgatttctaggctgtaatctttacaggaacagatcaccagctcttttttcctgcagaaccactgggtgggtctgaaccaccaacattttggttagcagctgagcacttaatctttgccccactggggctctacccagacctactaggtcagaaacacgggggcccagcaatctgctttaacaagcttgccagatgatccttatgtacactaaagcttgagaaccactgggctagaagaacttgtcttgggaattctgcatttaagggaagaatgagagaagggtcaatgacctttaaaatactcactgattatgggatacaaacagtacacatactttctaaatagctcatgcttgtagatttgtttcttccattagttataacaaaggcctacaatggccagggaggtgatggaaataaaggaatggcccattagaagaaaaatcacagggcattctcaagcctgtcttttattttcatggttttgatctagaggccaatgcagaaatatttcttgactataagaacaacatcagaggaagaatgaccataagggcaactggcattcaggggctgtgaggactgcgatgagctcaaaagcatacgtgtcacctaaagggaggaacgctgactgagatccagcttactgcagctgtgcatcagtgggggtccagatcttttgctttttaaggggaagccataaatctagatcaatatttgcttatatttaaaatgccttgattttattaaatcaaaacaaaacaacaaaaaaaaaaaacaatatgtaggtaaaattgcaatctctgtgtttgagtttctgagcaagggatcatgttttatactcattttttttgtcctccttcactccccaccagccagttttctccctccaggcttagcccaatgctaaatcaacagtagatactcagtggatacttggtgatgcattaaacttcctctagcatcagaaaggaaaccctggtggtatagtggttaagtgctatggctgctaaccaaggggttggtagttcgaatccaccaggcgctcattggaaactctatggggcagttctaccctgtcctatagggtcactatgagtcagaattgactcgatggcactgggtttggtttggtttttagcatcagaggagtcttggctgttgactctggcttctccagtcatcctgctggctaggaatgcaggcactaaagtggcttacttccctgtctccacatagaagtatcctgaaccagcctccacactgcattatcacatcttaggtatttttaaaaattttgaagtcatgtaacacttaaacttaaaatataaggagaggctgaggtcaaacagtaacatgctaatgttgtatacggcacatggcaacaaattagtccacatttgtttgttagtaactttacatgaaggtgctctgaaaactagtcctggtgatacctgttaacacttaactgagtggagtgcctattctgtgcatctactctgctaagcactttgcatgggttatgtggtttgatcctcttattggttctatagggtaggtaccattagtgtccgcatttccaggggattgaggcttgacaaattttagtaacttgttcagggttacgtagcagtatgtggtgaagctgggatctggactcaggcagtctgcctgcagcttccaaactcttaacctctatcctggaaaagtgctttacaaatattcatcaatattgtctttaaggggggcatctgaaataataattatcaaacaataataataatgataataacaaacctagtaaaaatcaatgtttgacaagagttgtgtaggttccgtaaactatctccatttcctctgtatactgtgcttcatcagaattatgataaaatcaatacatttgtcacctataggtggcaacagttgtacagttcactttttggtggggctttttattgcacttgagaacaagtgtagggccaaagagggaaggcaagagaaatattatcaagtctaaaataaataggtttttcatattcttaaaatattttcctgtctttaatagaaccatggcagtattagtgataattcaagcaagaagtggatagtgacatattctccagaaatctcctgagaattatactttacctaatttattattatttttaatgtttttattgtggtttaagtgaaagtttacaaaacaggttagtgtcacacaaaaaccttatatacaccttgctatacactcccagttgctctccccctaatgagacagcatattccttctctccaccctgttaatttaatttcttatagtcagtcagtcaaccaattaatcaaaccaatctactatgtggctagctttctgtgagaaatcagcgtgctcttgattctcagaggtagtttcacaaaggaggggctcttgaaatgattctgaaggggtaaatggaattaagatacataatagggcattctagggaaatgtccatctaacatgcttctattgcatttacggaccactctgtggtctagttcgggaccagtagttgcccacatagtctatctcctgtatgttccatgaacagaatcattgtaaagatgggaatacacagatagagacctgcctacccccacggaatttgaagatccccactcagactcaggaaagtatcagcccaaccaaagcaataaacagttaccatcgagtagaccctacatgtttcagggtagaactgtgctccatagggttttcatggctgtgaccttttggaagcagattgccaggcctttcttttaatcacctctggataggtttgaaccacagcccagtgcttattaaccttttccaaagaactctcccatctcttatcttgctttgttcttacatcagcctggaaggtgaaggggtcggagtcagctgtacttcatgtggaatatttttggagagattaagtggttcacacaaattcaaataggtattaattgtgaacacttggaaacttggtttcctgatttttaacatgcctaccatttttttcccccacagccaacaatattcatagagtagagatttagtttagaaaaataccctgaacactaggaaggataaaacagaaggcattgtgtgggccagatgatgataggaagaatatataagaagacatagaaaaactcaagtaataaaccagaaaaaatatatacatgatatcagtttcaaagaggtacatattatacatgtatagacagaaactcctgtccatagtaagggagaaacaaatagcaaattaatgaaatagtacaatcaattattgttctaagatgaaggctactcctccattattttaagtaagtttctgtcctttgattatatcttaaaaatactggttagcatatctactgtaagacgttaggaagagatatgagtctacttgtaacatttacagtcagcatcattcctctgctgggcactactatagggatggctggagctctcagtacaaactaatataaatagtatcttaacgtaagttcttatttctctgttgccatagagattcatgccaatcaattcaagaagacacatggtaggaaaataagagctatatttgtgaaatgttttgctatgtgctaggcactgggttgagtgcattgcatgaattatctcatttaatcctatgagacaactctttgagacagcactattattattacctttataaaaatttttttttttatacaagtagaggtataaaggtatatacaagttgagctcagaggtttaaatattacttcatacacatatggctaataagttagggaatcagggtttgagcagaagcagctgactacagaacttggaatcttaatcactatgcaccagaccaggtatttagacacttttgttcaattcctggcattgtgctaattagctgggtaacccctctgaaccttagtttctttacactgaagttttttggaatcttccagctctataaagctctgtgactctaaaaatttcttaattgagtgtcttctgtgtatctattattggaatttgaagtggcataataaatagccctaacatccctcttccccatcttagttctgaaggaatcgaaaaataagataaaaaagaaaggcagctgggaggccaaaacatgagttttattgttgaggaagctcatgttggagaatgtggtttctatctgcaaagaagtatatttcctaacactggtccccagacatagaaaggctcatcacttagtaactggcagctctggcaaaggtctcccccataaaacctacacaggggaatgagaagagcaagcgtgtttcagacagggagcctgaccccagagagggggtagaaaagcaggaggtaggtctaaacattcccattgctcttccaaacttgctagttaaataagtcactcctgctcccccttgggagaagtgaatgggggcagggcgtgagtgctgtcttagggagctccctccacatgaagagaaatacctgaaagtggggagaagtgtcaccaccactcaccccactgccacccaacatctctcactatgtaagacacaggttcgtaactaaatagtcacagatgcattacctaaaaacctagtgcatgaggacccaggtaatgcaggaaaattcccatactgctgtgggttgggctgggcagagaagactctccagaggtgaagaaataggagggatgtgatatagcagatggaaagaccaggagagcttccttccaaatagatgagacagtctgtctaatccagggcttcaggtcccttcctgatgaacaatcttgggcattgggaagagggactcagggaagagctatgtagtatactcaagagttgtaggaatagggaggaggtatttttattttaacctagggtctctcagttgaagatttgcacacatctcaaagtctatggtaagtgatatttgctgggggcaggttgacctcaggggaaaagatacagctaaagttttttctcttttctcagaggcactagttaatctcttccttaatatcacctcttaccgcgttcctggcagagctactttcaggatgagacataaaaataggtagaatgacctttggtcaatgccagagacctttccagacttttctcaagacttgtggtattaaccctgttaacctggtcaaattccaactcggataattactttctccctgtgctcaattccttctattacctcaacgggccacattactcttcacttgtccttctgaaaaattaatgtgacgcattggtaatagagaaccaccttctccgcccaacccacacagggagatgtgattcagcacttgggggcactctctgatccctgactggggccctggaaattctttactatctctaggcaaactggtcttattaggtgagagagtaattttcagctaagatgtgcttttatgactatattattaattatattggtgtcctttaccatgatcaatgactttcaatgacccctcagctgtaacctctgaacccagaaaggtaaaatgaactcactttttgagaaaaaaagcaagcaaagagaagtcagtaggaagcttagggttgctagagaataacacaccttgtggagagaaaaagaatgcatttcagagataaacaatggccccaaagcacatttaaagactagattaataagacagaaggaaagagaagaagtcattttacctaagagataggaagtgtgtccatatggaaaatgggggaagatgtggggccccaaggctcagtgagaagagaaaaaagaaacacaaagaaatctcaagccttgcttatggtcgagaaaggcatttgggaagaggaaagcatgcaactacgagttggggtaaaactgttacgcgaaaacacaaaggcggtgcctgtgacttccgcaaactttaatgttagtgccatgacttgaaatgcccatttgaaacttgtctcttttatttttggttttccagatgatagatagatgcacaaatctaatttaaaatactagttgatcgcctttagtaatgcaccagatttcatcagtattggttcatttctccaaaagtaaaaaatctgcactattttatggtgacctggaattgggaaaacaagtcagcgccttgatatcagtttttataattagcttaattaaatggaacatgtttatccctgttgttagattcattttttcttctttcagcacagaaatattagctaaaaaatttagtgggttatgaactgggaacttctatatctgttcgtttcagtgccaggtcagtgattccagctgatgaatgagaggacatcaagcttttttttttggcctttaatgtataggcaccattctgaataaaaataaacacggatgctactcgtgtaacttaaaggactgattaaacttttttctttgactaccctttctatcatttcatgtcttaaatatgaatacctggcagtctagcaagctgggccatgtctggcttagagttagtgggctggtagcataaaaagcctctaactctgtcagaggaaaacttagcatgaagggacgatcagtgcatagcaacaccatataactatgttatggactggagtgtaccaacaatcgctaagatggcacaggaccaggcaatgttttgttctgttgcacttggggtcgctgtgagctacagctgacttgactgcaacaataacgaccgttaggtttctttggcaaaaaacaaatttcctctctctgtcaaaagcagaaacctgtagacatatcccacagccatcctggttgggtagctcttccctgagctagacaggttttctcctgcacctccagtgggtttggccaacagctgagtaaggcagcagctgccatcacttcctggaaatccaggtgcagcagcaatacaataaattcccaaggggggaaatgttactgaaaagagcaaagcaatcccacgatagatggcacagacactggctctgccctttaaatatttcttctagccagtaaatgttgtcttcacctggtctgcgccagtctcaggcaatttgccctaaaccaaattcttatctccttcagacaggaggaagcttggtgaggtgctttggtgcttctgtgacaaggtaatcatcacactgatgacattcttaaaggcagcaacgagactattaggacagcaaatttataacgagggtgtatcaaatgaagaaatgaaactgtaggaagataaaatatagctcctttagtacaaaattgtagtaacatgctttttcttctctctacaacctgaaatatattcatttggcaaactgactattgcattataaaagctattctcttcataaaccacagaggctggctcaacaccacttgatgaggtttaagtcagccatccactataataaaaacaaactttatttttgtctcacatgcacagaacaatttttaaattaatgtaaaagtgaaagggccctcgctctgagtgatgtatgcccgccccataccaccgtgtaaacacaactcgattactgtgagaattaaacatggatcaacaaaatcaatagttaattgtgtaactcagggtctttcatttcagatctaatctgcaaagaaggtccaagggatgtttgtttttgattttcttaaaatattatttaaaacctttctggcaggcaaaagagttcacagggtctttacattatttccacaagttatttggctcgttggttgtgaaggtcatattgatcgcccagcttttccttttaaaattcagtatctttataagtcaagctgcctcattctgggtatctggcttgcacttttactaaacaaactttatggaagaaataacacaacataataggtgtctcaagagccaacatggatatactagctgtgttataaactaccctctggtatatttcaacgaaccctggtggcacagtggttaaagtgtttggctgctaacagaaaggttggcagttcgaacccaccagccactctgtgggagaaagatgtggcagtctaattccctaaagatttatagccttggaaaccctatggggcagttctagtctgtcctatacagttgctatgagttggaatcaactcaatggtggtgggtctggttttggtatattgcagaagtccctacccattacctgttgccctgtcgagtcgattctgactcatagcaaccctacaggacagagtagaactaacttataggttttccaaggagcggctggtggattcgaactgctgaccttttggttagcagctgaactctgaaccactgtgccaccagggctctgggaggttcaaatagctaatgcacttagctgctaaccaaaaggttggaggtttaagtctattcagagatgcctcagaagaaaggcctggcaatcaactttccaaaatcagccattgagagccctaggagcacagttctactgtgacacacacgtagtgttccaaaaccagtcagaactgacttgatagcaactcgttttgggacatttcacaatattatccatagcagttaggcagcactcccccatccctggtaaaacacactgcaggaagatgcaggcttttgtgtgatgtgctgaaagcaccgtgcggtcaggctgggcctgtagttggatgatcatgctgtctgttccaacatcccaagggaccagagggtaggggtgccgactgaatagaacccaaagaaattctcccactctcattagcccaaatagatgagaatggaaggagggccggcaggcctcctttgcaaaaggaatagcacactaacatccagaagaccatgggggtagcggatggactgccttgacccttgtcatattacagcggagctaaaaatgtagtgtttgaacttcttttccctttaaagtgtaacctttcatataagaagttaagccttgtgctcgcttacatatcgttagaaactttcatccattttgaggactgaacgcaaagtaattcttgaaataatgaatcattctttctcttgccagcttgcccagaaatcccatgattattttgctgtagcagacaatgaccttctcaaaggaggcctatcaaacactcaagataaataatgagaaggtctctttctcttgcctcaaggaaaaaatggcacggagggaagatgtttctgaaggcgtcaatctgttcattccaggacgggcggcagctcgctccaagtgaaacggagcagtgactgtgtctgcgtgtgaccagctggcccccttcaccaggactcccgaggcagagtccttggagggaccttgcaaaggcacagagacccgtctccctgtaacagtgaaaatgaatgtttctctggtggcagttagagcacgtctggaaccttttgactcaggagtaaattaactaaaggaaaggaagctctggttactgccacctctaaacaacctagaaaaacatggttcttatttaccaggcccaggagctaaaattagtggtaatgaatgcctcccccaccccttttctccccaagtcagccaatactcagggggtgaaaggagcccttccttgttattttccccacagatgcgaagctttgcactgtaggcagagctgcagatgaaatagcgacttctccgtgattgaggcactttagagttgcacaggacaatggagccagcttcgcatggaagggccatctgtccatccttttggggctctggtccttaaggctctgtggacagctgaagacacagacttcaccttcaggagtaagagtaagccccttccctttcctctgggctccatctcatccttgtcggaacccctttccccacagcctgtggatggatggcctgattcttgaccaagggaagagaattcctggttggcagggtgcacaggcaggcacggggaaggaggcatcagcacaaacacacgggccatgtgagtggagagtgcagactgtggtgaaccagaatatacctgttccgttttgaggtgcagctactgtctctttaacaaacatttatgtggcatttactgttgctgtacacattgcacagaagaacccacaagacaagtactattaaaaccaaaccaaactggctttgactcatggtaccctctggtgtgtcagagtagaactgcacttcataggggtttcaatggctgatgttttggaagtaggctgtcaggcctttctgctgagaagcctctgtgtgaactcgaactgccaacctttcagttgggagctgagtgtgttaaccatttgtaacacccagggacccgtaggcacgattagttatccaatttaatacatgaggaaacagaggcacagcgagctgagtagctggcccaaggccctgaaggtggggcagccaggaagagcccggagtcagacctggagcccagctgcagaacccctgctctcagtcattctccctgttgcctcagggccagctgatttttgtcctgtgagaatgtgggcccagctcttttgattcttcatgaaaaatgaaaatctgaaatttgcatatgacatcgtctaatgcttactttgtttaaaacaaacaagtggattgaacaaaacctgtctgtaattgtgatggttaaggttgtgagttaacttggctgggctatggttctcagtggtttggcagttatgatgtggtttggcagttatgtaatgaggcacttggcagttatgtaatgatgtaatcaactccataatgaaatctgctatgagcagccaatcagttgaaagggagtttccttgggggtgtggcctgcatccagtatataaatggatgctccagcaaggctcttgctcttgcacccagcttgtcatcatctgacctccagttcttgagacttgagttagcagtttatctgcccatcttggaatctgtcaacgttttcagcctgtgagccagaggcctgcagtctgacctgctgatcttggattcatcagtctccgtaggctgtgggccaacagcctgccatctgacctgccaaccctgcagctatgtgagtcagaagaagccttcagcctgatgcctatccatagacttgtgacttgacagcctttataaccgtgtgagccatttccttgagataaatctctctccatatatatatatatgcttcactggttttgcttctctggagaagccagcctaagacagtaattaattgataacttttccatatgacaacctaccaaaatctagtgagatccaagcctcaggcttctggtcagaagaataatgattctacttgctacctaccctagggcaagagcattttaaacagaaaccaaatgccctaatgatacttcctaagttcctcacctccactcaaaaaaaaaaaaaaaaaaaaatgcaaaagccactctttatgtactaacaatctgggtggcagaccagtaaactcccacctactgtacctagtgtgtcaacacataggactactgtagggagacaagataggtacagaggatgcttttattctcaagtttctccctctcaggtgattttctactatttcctttgctggaatgagttgcaagcacacctactgccctttgacccatcatcatcagaccctacacttcaggattatttcttcagaagtaggtttaagttaaaggagtgctggtggtgcgtggttaagcactcagttgctaaccaaaaggtgggcaatttgaacccaccatctgctccatgggagaaagatgtggcagtctgcttctataaagatttacagcctgggaaaccctataaagaagttctgctctacttgaaggcagtgagtttgatttgatttggtttggggtttacgttaccgtcgtttggttttaattgggcctttccttagtaagaacttctaaacttcttcaaatgtaggctaaaagccaaaaaacccaatgccattgagttgattccaactcatagtgaccctataggatagagtagaactgccccatagagttgccaaggagcgtctggaaactctgattcgaactgctgaccttttgtttagcagccatagctcttaaccaccacgccaccagggtttccaacgtaggctaagtgataattaaaatacagttccacaaggaagatactgtgaatgtccccaggctttcaagagcctacactggccccttcattgcacctattgctgcagagaataccggtttgcctcttttaacttacaggatttaggtcaagatgtaggaatatggcaggtccaaggtagcttttttctgtgtcaaaaaaaaaaacacaaaaacaaaaaacctgttgccgtggaatcaattccaactcatagtgaccctatagggcacagtagaaatgccccatagggtttccaaggagcagctgatggatttgaactgctgaccttttggttagcagcagagcgcttaaccactgcaccatcagggctctgacaaaatgaaaagtcaataacaaaaccttgctgttctttaatgctcacctctccttggaatcattttcatacaaaatagagatttaaaaaaacttggctctcagaattggatcaatcataatctaatgttcatgaatggagctctggtggcacagtggttatgcactcagctgcaaattgataggtcggtggttcgaattcaccagctgttctgcaggagaaaggtacggcagtctgcttccataaagattacagccttggaaaccctatggggcaattctattctgtcctatagggttgcaatgagtagtaatcaacttgacttggtggtcacctttcatgtgggaggcccaggtttgattcccggcccaagtacttcatgcacaactaccacctgtctgtcagtggaggcttgggtgttgctatgatgcaacagatctcagtggagcttccagactaacactaggaaaacaggcctgccatctaccgctgaaaatcagtgaatgaaaaccatatggatcgtgatggtcctatctcactgtgcatttggtcaccacgagttgagggtcaactcaatggcagttaacagcagcaacaacaggagcgacttagtgaggtccatctctggtctgaggactaggtgaagccttaaggtcatctcagtagatctttggcctgggctgcgtcccacagagtagaaatgcaaagtggcagaagcagaccaacgcgacaggtagcaatttttcatagatcagaagtgacctcactacagaagcgagggtggaagggggacaattatcttttctcccaccctgtgcaaattcaggatttcagttagcgaaatgtgagtgggctggtgcttctctgtgctgaattcagtgtgtacggtttctctgcaatggatatctacagttctctgaagtgactggaaaaacactttcccttaaatcagtgtgaaagaaattactggcaagctgtcccttaaacatttctgttgggtgctaccaaaggattatttataatcatgaatctaacacaaaggctgctgtccatgggaaaatgactaggagaaagatgtttaagtccaggcctgctaagcatggacaccaacctccttcccctcacacaaggaatggctacagaaatctcattttaagcaaggagcaattaataaataagaattaacccacacaagaatgtttgagtgtatttggctatctcggtcaggtccaataaagatctcttgctgtgagccagcgagaggagaaacatggtgaaggatgttataccttatgtggtctgaacgtgattagtgatcagtgccagtagcgtcggtcgctggggaatggcaatcagcctttctctcctgcaactgtgaacgactagaaaacactgctggctcccattccatcctatgatgggatattaactcagaatctaattaatctgtgaatgaattatggcccaagaaatatactgttttataatcaattttaagtgagtccctaacagaagataagatgaagaaaaagctgtaaagttataagaggttgatacattctgttcactatgactgatgattttaagggggataattttaaaatctatcaaatttttgtcatttcaaaaatcatgcctcccaaagtatgctgtaaattcattttagaatttatatatttattaaaaatcatattgaaaacagcaggaagtgagccccatttgaataataaaataacttgttattctgctggagataaaacaaacaaaaaaaattaaaatgttttattttcaggaaaaaatggctccaggaattagttaaatcaataatttatattcactggaggcactgacagaatattaaaaataatcgcccaaatacacattttggggggatggaatatttcacaatacttaaaagtaacaggaagacaaataggaagctgaggaccgtggctttcacctatcaggtgggcaggtttgaagttaggctacaactaccttgggagaagggtaaaaaggtgcagacgggaaaaccagtggtgcagctcttgggtggaaggcagttgacttcatttgaaaaggctcttttcaaagagattctcgagttcacttctaaaagcctacttgactgaattcttgcccagaatgaaagacattcttgaggtacagaacatcccaggtgtttgtggtatctatggctgttgaaatgctggtcactggcttggtttacaccagagcactcagggaaataatgggaagggacagggttctaactgcagggttgtgccatactacatatgggcaaacacaaccattcactgcagattaccatcataacggaccgtcaactcaaagatctggccctaggatctgaactgcctggattcatctacagaaagatgaaaaggtcaaagggaagagagctagtgtgattcaaccatgtgtactctatagtacaagagagactccactggcttaactggcacaaggagaagtgcttttcaaactcctgaaagaggagggagaatgagaatacttgttttccagagggatgcaagatagtctgttaccgttaccataagaaaacaacaaaggtccctgtaggtgagggacttggttcacactgtcttagtgatgcagacatcattggtctagtgcacacatggaaaattcctggtacttgggtggcaactaccccctctaatgcccgtaccaatcattgctaatcaatctttgtaattcctcccctattttaccctggaatcagactcaagactccttcttaacacagcagttcagataatctctaactattgattattcttggcatttgagtttcaggctatttggcatttctgcttagtatatgtttatatatcagagtatctatatatattaattgttgttgttgttaggtaccattgagtcagtttccactcatagtgatcctatgtacagctgaaggaaacactgcccagtcctgcaccatcctcatgatcatatattaattgggtaggtatatgtggctaatataagatatgtatattgatgtctcagatatggaaacttgacggcacatttgactcctctctttctctcatgcccacatccaccaaaaaacccgttgccctcgagttgattcctactcatagcaatcctacaggacagagcagaactgccccatagagtttccaaggagtgcctggtggatttgaactgctgaccttatggttggcagctgtggcacttaaccactgtgtcaccagggtttccccaggtcctggtaaattacttatttgttctcaagtgaatccttttcttttgctctgcatcatggagaactacatctcccaggctccctttccctctggcatctggggaagttcagacaaagggaggcactggctgaagcctgggaggcagaaggaggtgagaaacagggcatttcttccattctctatttcctgtggtgttcctggtagtagctgcttttcctctatggctacatcttcttccaggcagccttaccctccatggttctagctcccattggatggccaggcttctgaactctaatgtcaccttctgccattgtcccttcattcctagtggtgtttgtgaattcctgcttctgctacatctctagattaatgattatcccctgttcagcttctcagttcttccattacctgggtaagcaattccctgcattaaattccctctacaaaaagatctagagtggctcccattccatgccggaccatgggtgatataatcagcaaattctgtttgctctactttcaaaacacatgctaaagctagccatcttcaccatctttctccatgctaccattttaggtcaagctaccaccatctcttgcctggatgacagcaatcgtttcttaactggtcccaggacatccactctcacctccctatagcctgttccccattcggcggccacagcattcctttgaaactaaatcagatcacatcactaccctggtcaaagtcttccaatggtttcccattgctaagaatgaaatccaaagttcttaccacagcctacaaagttttatgtgatctggcccctggtttcttctccatcctaatttccttcctctctatcactctgctccagccataacggccctggtacacacagggcccttgcacttgctgtaccctctgcccaatatgcctcttctttaagagtcaaacttcagtgtttcgcttcattcaaacctctgttcaggtgtttcctcctcagcgagaccttcgctgatcaccctctctaaagtagtgccttcgttatttcctatccactcacctacttgacttgctatagcatatatcaccacctgatattatattactttttttttgtttattatctgtctttcccactaaaatataaattccataaaggcagagacttctttttcttctttttaatagccttttcaacctaatgtctggcatgctacctgttgagtactacaaactctgtcttaggctgggttctctagaaaagcaaaaccagtgtagtgcataaatatatgtatatagagagaatatcaagaggctgtagaggctggaaagtcccaagttggtgggtcaggctggaggcttctcctgacttacacagccacaggtgctggtgaattcaagatcagacgatcagatagcagacctctggtttacaggttgtggaggccagtgaatcccaagatcaacaagtaagacagcaggtaaactgctagatcaagtctcaagaaccagagatcagatgaaatggagccagctgtaggtttcagggtgagcaaaagccagcaaaccttgacagaaaaatcagtctatattggatgcaggcctttcaactgcttggctcctcataacagacctcatcatgcaagtgatcacattagataagatctcatcatggaggtgattatatcattaaaaagctgccacattacatcttaactgccaaaccactgaggatcatggcccagccaagttgatacacaactttaaccactccatactctataaataaacattctcgagtcaatggataatgaatgaggaacctatatcacacggtgaagaacaagtggcacaaagaaataagtagatttatgattagaataaaaacaaagattcaaatacttttctaattaaatcaatatacaggtacaaactggacactaactacaagccagggtattgcttggtggctatgacacccgctaagttcacgaagtggactatggtcagtgagaaagctcccatggttttattgttcccatttcagcatcctgccatccctccttcttggccactgttccttagcctatatttagtgcacgtgcaagtgatgtggaaatgtctccaacaccatgcatgtcagaagggaccagagagttagtggatttacccttttgtttacttgtcttaattacagaaactagacaaatatatctgaaatgtctaggcttattgcctactaaccacttcttctggccaggagttacagctaggaatgaccacttgtttaaaggctatgacgttaacaaattcctaagagctcataggtcaaagccgagttctgcctactgaagtccaaagtgttattaattcctctgtactatgccttcttcgatggcactgggtgggggtatgccttctgctttttggctttgggtgctgtctagaatactcagcatcattaacaggggccattttaggacacaaattccaggttttagaaatatatacatatgaggctctttgactgatgggaagaaggaagaccattttgtttgccttttctttattagacttaaaaatgggaggctgaaggtaatagatatttgttcaactctgcgccatgtgaaattaagaaattatgattacataaattctgtaaaacattaaaaaaactcatttgaaaaggaaaaaaatcagacaggaaatgagatcatatttagagtatcaggaaacattggaatgcagaaatttccgggaagtttcttttgatatgcagattaacacactggcctgttaagttacgttgatccctttgtatggctcactccaagtgtgatagaaagactgtaaccaacatttcctttcaaatgtgtacttcgtccaaaactcttctaaagttttagtcctaaagttttcctctctttaaaaataaattcaaattcaattccctagtaaaacttcaaaatgttggatttaggcccaggattctattcccagctagaatttttccccacaatatgctcggggaatacacctggtgggctgtggatataaatggcttaacttctttcacttgccttgggattaaaaccaaacaagtgagtgagtcatagactaagttcaactcatgccaactggggtgccatctggcataatgaacagagtctgaccaactcctcagccttcctaaaaccaaataaaatacgaatatggcttttcatagagtccctactacatcacaaaaggtaggtgggttcaaaactttggatcaaggctgagcctagtcaccaccctccagtctccaacatggccctcaatgaagttacggactaatgtgggtcatgtctatgcttacggtgaaggaagacatttctttactgaacggaaaaagttactcgctattttcttggtaaagagtaaaaagcttgggtgaacagcaggatctctctctgaaaggtctatcagaagagacatctggttaagtgatgggggaaaacaatctggggaggatggaaatgtcagagcaggcggtgtctttatgggagacatgactttctgacccatggagctttctcttattccttgcttgattcctggccatggctcctacctcgtgtcccataatcccgaaataaatgataaacaaagaaacaaaccaaacccagtgccatagagtcaatttcgactcatagcaaccctatagggcagagtatgatagtgcatgacaaattctcagtggaatcgtctctttcaagaggaaatgtgccagtcttaattctgttggtttcttgctaggatctttgtgcacaaaggagggaatgaatccaaaaaaggcagccttcgatatttagggccttataatatcaaactgtgcctatactagaaataggatacgaggatactttttgtcactcctgataccgctatgtgagcctccatcatgtacatttgcgttttcccccatttgaccttttaaaatttttataggctatatcactttacatcttccctgacaatctattatctttcattttttaaaacagtattttattgtgttttagatgaaagcttatagagcaaattaggttcccatttaataatttttatacaaattgttccgtgacattggttgcatttttcactatgtgtcagcattctcattgtttttattctctttgttctgttgccattaatctagcttccctgcccctccttaccttctcatttctgcttttgggtaacacgttaaccttttggtctcgtataggtgattatttaagggagcacagtactcatgggtgaaattgtttattttataggtcgacctattatttggctgaaagatgacctctgggagtggcttcagttccatgttcaaagtgtatcttaggatgatagtcttgggggacaatagtccagtctctattggtccagtaaatctggacttttttaggaatttgagttttggtttacatttttcttccattctacccaggaccttctattatgttcttggtcagaatggttggtagtcacatttcttttaatgttaaaaacttttgaatatttaatttcagagatgtatacccttcttcctagagttcttgaatatgcttttctactgaagattaaatatgtttcaaaatactatacacactagcagttaactttcatttgagtatttattctggctttagccaacccaaaggtactaaatcttggtttgttttaaaaaaattcaacactcagtgaaattaatttgcaacaaaggtgatggtgcatacatttcttttaaagtagcaagtgtttatttacatggacatagcctgagcactggtttttttagcctgagcacatcaaatgccttggctttgtatgcaaaaatgaggacatgatgatctcacagaagggcatattctgtgacttctatttttcagtgattggtacagatttctgttgattgatccattccatagagtctcgctctcctatgaccaggagttcacagctacacaaggcttcctagcattggaatattccaattggcccatgtggagataatgattaaactactacttactgaatacttcctgtgttcaagggctctgatagggactgcatatacctcatttcctttaaattaccacacctttatggaggtcgattctcttatgcccattatagaggtgggaaaactgaggttcagcaaagttaaggagtttatgtagagacagaagggttttctgattccacaacaacagtcttttcattggggtcattatcagggagggtaatcatctatgttcactgatcataaacatagatttaaatagctatcagaattgaaggagagaaaatcaaaactaagaagaaattctcctagactcacagttggtaactctttaaatcaccacttcaagcatccttaagtgaggccacatttgagtaattaggagagggcctggtaagatagaccccagggtggtctatggcctcatgtccctagacttctaacaatgctctcttgaagagaagtcacctgaaagagttggttcttggagtcacctgtcaggatgtgcttcgatgtggcatgggcgtcagttcagaccagggccctctgataagtgccacttgaatttatatcctactttggaaaatttgtgtgtttaaattgcatagtataacttataaactgtccaaatcatctttgtcattctttgctactcagagtgctgaatcctcttaggggaatgtcatattagatcatcgttcctgttctgaaaacctgtaggtttctcaagaaatggaagtaactaacataagcagaaagaaaaatggcatcattgttttctgctgagcctttgtgacctttccagaggcttccacgggtcaaggtcccaccttcttttccatgtccggaaggaagctaagtgtgtatacgatgacatttttcattttgatatagttgatctgtttcccagactgtagaaaactgggaaatgacttttcatttaaataaaagttgaaaccctctgggaaagcaaaacaactcaagaaatatagagaagtagctgtttccaagccaacaggagaaaaggagagtcttttcagttttcaaatgagttgttaggaaaaatgtttttcttcccatcaaaccttcacttctctttaaaatagattaatcatagctgtgtaggcttagctttctgtctgcttgttaaaatgtggaaaatatgaacagtggtttccaactttcatgagtaaattgtctttttgtgccttttattagcccgtctttcaagccccatgttggggagctgacactttaccggtgggatctctgcaggggggagggggatgtggaccacccccagtgtcaccgaagcaactgtctgtaaaatctttgtgcagtgtttcagcaggaatttgttattttttataaaaatatccctgtagctacttataacaataaaaacatttttgtaagcccggcttacatatatcgatataccgacaaggctacaactctgtgctcatttactttttgaaccttctaatgccctgccgtcggagctgtcagtattacccaattacagcgatgctttcaaccccacggctctgtctgcaagcgcgataagcacgcgctgcagcttccgttgctgccagtgtctttatggtcactgatttcaccacattttctggtgttttattgtggtaattagcatgcagtggggtgagaccacgagctaccacgctgagtgacaccaagcctagtgatgccactgctcctaacttctgtgcatttcacttggtaagaatatgctaatggttatgcagaccgcatccctaagaggtactgacagtgtaattccagaggacaaaacagctcccaacagtaactgaaccaacctggtggggttttcctgcttaaaaagaccaaatttcttatttttcttttaaaataatgaaaaaatagcaccattataaaattatacaacctggtttattcttcaaaataactctctagagtacaaagggcaaatgcacttggtcgacctgggtgtgaatattgactgtgtgactttggacgagtcatttagctcttctgaatcttggttttctcacagcgtagctgtaaagcaacagctctcaaagtgtggtccccagactagcagcaccagcatcacctgggaacttactagaaatgcaaattctcaggccccatcccagacctactatttctgaaactcagagcccagcaatctgtacatgaacaagccctcgagttaattctgatgtatgctcaggttttgagaaccattgttataaagatgtggaaaccctggcggcatagtggttaagtactacggctgctaaccgaaaggtcagcagtccgaatccaccaggcactccttggaagccctacggggcagttctactctgtcatacagggttgctgtgagtcggaattgactcgaaagaaatgggtttggttttttttttttttggctgtaaagattactaataatatatacagaagggttgcttgccacattgtagaagctcaagaaacagcacctattctctttttactattacccccattatagagaagaagaaactgaagcacagagccaggtgctggcaaagctgggaatagcaaccaggccttctcactctgcagagtaaaggggacagcctacttctccattcttcatttctatgggatgtcgtagttacataaaaataaaaaacaaaaccacctgctgtggagttgattccactcatggctaccctgtgtgtttcagagtagaactgtgctctatatggttttcaatggctgtgaccttttggaagtagattgctgggtctttcttctgaggtacctcagggtagatttgaaccactaacctttcagttagtaggcaagcacttaaccttttatgccacccagggatgccagtcgtatcaatcctagttgtaagtgtcctgtgttggatattgccaagttctggcagagtggggtatgcaggctttaaggtggagatcatggctcttcttgacaggatatattaatggtaacctgtctccctgctttctggtaaccactggtgcctatattctgtcaacaaacatttatacatcttcaactaagttcaaggctagatgctgggcaggtggtgaatagaaattgtttttctcctgtagataactattttgtaactcagaagtcacaaattatgacttgcttagactcacagttttagaagtggaagtacttttagagccatttcagttttctaactgctttgcagagagctagagctgtgggtgggtctcttgcctggctgcacatagaattctctgccgggcttttaaaaaaatactgatgggaacctatgacccagaaattctggtctaactggtctagaatttaattgattaaaagctccctaggtaggtttaccagataaaacagaaagaacacagttaaatttgaatttcagatagcaataactagctttaatataagtattttaatatattacatgacatgcatgtataaatatcgtacatgaataattgggatatacttctactatgaagtatcatttattgctatccgaaattcaaatttaactaggtttcctgtattcttatctcctagatctggcagtcctgttaggggattctaaggtctaggccccaccacccgttggtcagtttgtcatactgtagtggtttgcacattgctatgatgctgggaactatgccgttggtatttcaaatactatcagggtcaccacgatggacaggtttcacagagcttccagactaagacagactaggaagaaagacctgccactctgcttccaaaaattagtcaatgaaaaccctatggatcacaacagagtactgtctgatatggtgctggaagatgagccccctaggttggaaggcactacacaacagccataacaatggcctcaaacctaccgatgagcatgaagaaggtacaggactgggcaatgtttcattctgctgtacttggggtcaccatgagtcagaagtaacccaatggcatctaacaacaactaagaatctgttatagggtttccactgaaatatactacaggttctactatagtggcctaaaggcaaggggcaaggcactatctgagcccatcattccaacatttttatcttgttcatatattgagtctctgaaatgttttacttgtaaaaagttattttacacacacagatacaaaagtatttagtttgctaaaaatattcacaaatctctgatctaatcaaattttttaaaaattccagatgagaaagttgaagagccagagaagatgcctcttggcaaagctttcatagctaactaacggcaaaacccaaaagcaggtctcttgctctctccactccataagctgttgggacaaggactcttcccttttttttctgagctacagttcaggaacaggaagtgctttgctcctatatctaaaaactaccagcatgagttgccatggagtctactccaactcattgcgaccccaagggtgtcagagtagaactgtgctccatagagtttttgagggctaattttttagaagtagatcaccaggcctttctttctaggtgtctctgggtggactccaacctccaaacattcggttagcagctgagcacattaaccatttgcagtccatggactccacatccagaagtactggacaagcatgtagcaagtctctaaagatgcgccagaccttgtgccaggtgctgggctaagggactaagacgtggttttgcttctcaaggagctgatacgggggaaacacataaaagtgttgctgtctctagaaaaaaaaaaatcacttatttttatgacttgttgcctccataatttgactattcaaagcatctttctttgaccaccaagataaaaacagtgaggttagaggttagatcacattgggttccccagagccaacgagagggcacctggaatctaacccaaattttcattccgaaaggtaaaggaatgaagaatatatcataaccaatgacacaggaatgactgtactttatgctgggttgggattcacaatggctacatctgtcaggctttttgacaaacggccttgaatgttctccaattaagtgaactgcatagtaaattcaaaacttgcaggggataaaaggatgtatctttcggttttgggaaagaagtttactcccatccagaggagggcaggtaatcattaaaggtatttctgtgccacatgaaaaaacaaaatacaaacaggaatcgatggagtggaggtggtgcgttctctgaggacttccctgtcagtgtcaatttggcagggtttgtgatgggcagtgtttaatgacagctcacccccaccccccggcagcattcctggatgccaaggacccagaaactaagggacactccaggctcctcatccctgtcccctggggaagacatttttaggtgatcagttggcctcaggtaaagaggtggaagaagccagactaacaagctataagcaggtcaacctagaggggcaaatgagctccagagatacaattatgacccccggagagcttgaactcagaatccaaacagtctcccaggctctcaccacatgggggagtttgcaatctgctctctccatttatagaacacttactgatttctagatcttgctgttttctgtttttcttgaccacagcttccttcctaccacgaccatcaccaccaacctcactgggtcctctgagcctttatgtttcattacagaggttactgtgggctgtgatttgcaaacttccctattacttccttccagggtcattatgggtctaagaaccccagggtgggtgatttctgatttgcagagtgatttctctaggatttaaaatcctttgttgccatttgaggataaaaggtataaactgcgaacattttaaaaatgacatactcaaacttgtgtatacacacaaacattgttcctttcaatacagtcactctgggatgtataaatttattctacgaattcattttggaaatgcttcttttgaaattgttttcaggatcaagtttatcagactcattattctatgctcacattttgattttgatcaaaaatagtattattgtctggattcaccagacttgcttccgactgacgctgagataatttcaaaagccaaattcaccctcagtgggtgaagatctgctctgcttaagggaacatggacaccaaactgaacaatggactggattttcctcctcagtcaattgagatggctgggcatgactggctggctgaatgtttaatcaggtctctcattcattcaacaaacatttattgaggacttcttttgtgtaagcattgtgctaggttttgaagatactaagataattcaaacatgagaaatacggtgaagagcctttccactcgtaaaatactatgtttatatacttaaaaaataattcatagtctttgaatttctaatactattttaagcaaatgcagcattactgatataaatgtataaccccctggtactcatttgcgtgtccaaattctgatgtgctagttaaaaaatataatgattgttatttaaagtcactccttattcatctgtggtcacatctgtgacaaagacagttaactgtcacccaataccctattcttccttttaatactgaggtttagttgggcacctggcttcccagttacagatcacatttcccagctgctcttgcacctaggaatggccaggtgactaagttctgaccactggtgcctaagagaagtgatgcatgtatgttcatacccctatccacaggtcgcatgcataaaatgaagtactgtgcccttcatttcctctttctcccttcctgggagctggaatgtggatgaggtactggtaaggctggtaagacagctacgaggatgaggctatggagtatctcagcagatggcagtgaagcaatgaataaaaggaacatgagtacctggatgatcttatggaacaaagccagccaggaatcatcttcctacctctggactgtttttgagaataaaagagacttctatttggattgagtcattgtgttttggggtctaaccacagtctggcctatgcaccaactgatacatcaaaacagactcatttccagtcatctgtatttctactctttgaacactcagaagaaaacagattaaaccctttcattcacttctactctgtaatgggttgtcttatccctggttaggtacagaatgcctgtgtctgctttatcaagaacttttccactatgggtgataagatcattccgcctttgattgctacacctcgttttgaagctctagcaagaccacccctccactggtctccacatcaccatctgcaggagggaaatgcgaggctgagtgcaacaggtatttcaggcaagaattcacctttgaactctacattgtcaatgacaggagtgaagagggagcccccatatctgcatgcttacagaaatacctatcccccgccccagctaccctccaacacccagagtcttgctattaccatcttcctttaagctgcaagattaatctcactaaggcttgtccctgtgtttgtatcagtaactctaagaaccttaggactcccaggtcattcctcatcctctaacactcatcctcttttggttctgtatgacctcctggttgaacccacttgcatccctcccatagctcctgaaactttgcctctgtgtgcttgaaactcaaggttaattaacagaaaagttccctatattgtcaacatttctgaatgaggccttcatgtagttctaaggaaaatctgactctcctctggggaaatggaggtggagtagctgttctcctttctctccttgttgctttctcccgagatgctgaggtttgaatttcatgtcatctgactttgccatctactccctctccttattaacaatcatctacagagcagatgaaatcaccatgaatcagaatcaactctgtggcaatggatttggttataggttatagatctcttggtcaatccctattattccttgaagactttagcttatgatttactatcagagtctccaacacaactctagtcacaaaacttgttgagttcaatatccatgcaaatgatcctttgtaaaccctggctatgactgcctctcttccatagaacttgccctctgcccactcccatcaccaactactccatagcctcaatttcaaacttcccactttccagcatgtacctcctggtttcccagcttattccttctaacatctcaactccaacaatccattgatcttattaactttttatgatccctcaggtccacatttccattcttattaagcttgtagtccacagtttgtcattatcaccacttccttatctcaactcctttgcgcctctctatttggtaccacctaacaaaaacctaaccttgttacattcaactctgttctttttactcatgctgctgaacgcggatgcagataaacatacaaccatgctcactggtctcatttaattcacaattactaacttgaagttagtaatttgggcaaatttgctgcaaaagacctctttaaagtgttaaaaagcaaagacgttactttgaggactaaggtgtgattgacccaagctatggtattttcaattgcctcatacacatgcaaaagctggacaatgaataaggaagactgaagaagaactgatgcgtttgcattgcagtgctggcaagaatattgaatataccataaactgccagaagaataaacaatttgtcttgaaagaagtacagccagaatgctccttagaggcaaggatggcaagacttcatctcacgtactttgaacatgttgtcaggagggaccagtccctggagaaggacactatgcttggtaaagtagagggtcagtgaaaaagatgaaaacctgcaatgagatggattgacatggcggctccaacaatgggctcaaacatagcaacgactatgaggatggcgcaggacagggcagtgtttcgttttgttggaacgaaacagggttgctatgagttggaaccgactcaatggcacctgacaacaacaacttcaagttggcaattcagttacgcttctctagtccattccctttcaccatttcataggctatattacaacttctctactctcttcagaattccaacacctgcttactcatacttactattatagattgaattaaattccccccaaaatatgtgttgtaaatcctaacctctatgccagtggtgcctgttgggcagccctggtggcacagtggttaaaagctcagctgctaaccaaaaggtcagcagtttgaatccaccagcggctccttggaaaccctatgggggagttctactctgtcctttggggtcgctatgagactgactgaatggcaaagggttttggtttggtatgcctgtggctataatcccatttgggaatgggttgtctttgttatgttaatgaggcaggattagtacacctgtatcttgagttagtctcttttgagacataaaacagattaaataaaccagaaaagcagaggtgggggaagattggtgccaatccacatggagatctccaaggaaccaggaaacagaagctgaagcgacaaggaccttcctccagagctgacagagagaaagccttcctctagagctggtgctctgaattcagacttctagcctcttaaactgtgagaaaacaaacttctgtttgctaaagccattcacttgtggtatttctgttatagtagcactaggtaactaagacacttacttttagctgatgaacttgctttcaagtaattggaagagaaagctgacaaagtgtcacccatatctaccaaaatctgtctatcaatttccctgccctccagtcactatggatcaatatcctgctcctatctaaggacagcccctccatttatacaatagatctcccctttgtcttacatcttcagtttttcctctctctactggattttttccatctgtatactatttgctgtaatttctcccatctttactaataccctctccggtgaccctatttactgcacccttttatagcaaaaatccttgaaagatttacatatacttactgtctccaattcctctcattctgttctctgtggagccctctccaatcagatgttatccctatcattccacctcctgtcaaagtctccagtgacctccaggttatgccaaaggtcaattctcactgcttatgtgaatcgtcttcatttgacatacttagtctctttttccaccttgaaaactctttcataatctacatttaagagtctagtgagatttaaaatgtaagttgttatgcaaagcccggtggtatcgaatcctgaatcaggaaatggccacctctgtgagggaaatgataaacaaaaaaacaaaatcggggaaaagatagaaataataatttttaataataataaaaacaacaacaacaacaacaaggacccaaatctagcctttaataatagataatgtccacattttaacatcagaggttttcacagaagcttggaaagaatcttagaattcatctagtccaacactccagttttacagatgaggacactgaggcccacagaaaggtagtaatttgtccacagttacagtgtcagagttggaaacagaacctaggtcttctggttttaagagcttcttccagtaaccaatttataccggtttatattatatatggagccctggtggtgcagtggttaaaagagcttggctgcaaaccaaagtgggcaattcgaatctgcgaactgctctttggaaacgctatggggcagttgtactctgtcctatagggtcgctatgagttggaatcgactcaatggcaacaggtttggtttggtttcagtatatggcatatatgcgtgtatgtgtgtattaatatatactttataaacacatacacagtagtccctccttatctgcagttctgctttccacagtttcagttacccagggtcaactgcagtctgaaaatactaaatggaaaattctggaaataaacaattcataaagttttaaatttcacgccaatctgagtagcgtgatgaaatcttacaccttcccacttggtcctgctcgggacgtgaatcatcccttagtccagtgtatccatgctgcatacgcttcccgccctttagtcacttaatagctgtctcagattgactaccgtggtatcacagtgcttgtgttcaagtaacccttattttacttaataattgttctattttattgtttgttattgttgttaatctcttactgtgcctactttataagttaaactttatcatatgtgtgtatgtataggaaaaaacatagtataaatagggctcggtcctatccatggtttcaggcatccactgggcatcttggaacgtaacccccgaggataagtggggactgctgtataaacatatataaatatatatatgcacacaacacataaatacacacatatttaagtttatatatgtgtgtgttattgttgggtgctgtcgaatctattacgtgtcatagtgaccctaaggaaaacctggtggcgcagtggttaggtgctacggttgctaaccaagaggctggtagttcgaatctgccaggtgcttcttggaaactctatggggcagttctactctgtcctacagggttgctatgagtcagaatcgactcgatggcagtgggtgggtgggagtgatcctataggacagaacagaactgccccatagggtttccaaggctgtaatatttacagaagcagattgccacatctttctcttgtggagtgggtggtgggttcaaaccgttgaccttttggttagcagctgagtgtgccactaaggctctgatatatgtgtatacacatatgtgaatatagctttttaaattattttttcctgaatgaaagactgttggggagaactgatccagtccctccctctctggcccctcacctttgatattgtcaggtgtccctacttggttccacttagtgggagattaagcccatcttccagtaagacggggctgatactgaggcaaagggctaccagacactcttgcctttgaagaccactggttgaatataaaactcgctgccctgggccaccttctctggtctgctgatggaaagaggctggatctgggaatagggggaaacttaagtttggagccagctagctcactgggtaacactgggtgtttttctcatctgaacaatgagcattgtattaggtaaaatcacaattctttcattctaatctgcagtgcctctagctaaggctctttggcctgatcccatgctatctataacaccttctcctgagattctcctgagcagcctttagcaactcatccatcacccacgactacattattattgagctttttgcctatctggattgggctatctgcatgtcggccttggccctcttctctgatctcccttgatgggattaccagactatcttatttgtgttctctgccagaccccttcccatctaattagactcttggctctagctacagccagacagctgcttcccagggtctgatgtgacatgagagaatgaataaacaatgcaagtgaagagagggagggtagcagaaaaaaagcaatgggaaagaaggaaagatgagaagaagaaagaagaaagaaatggcatcatgacagttaagcatagtaccccctgacaatgactatggtctataagaatataagatacctgaacaggcaccatccagttcttctggtctcatggcaaaagaggcagttgttcatggaggcaattagccacatattccctatcttccttctattctcgactctccctcttcctctgttgctccaggtgaatagagactaattgttgtacctcatatgtctgcttgcaaacttttaagacttactgcaaaattttaagaccccaggccctacgcagtgaactaggagatagaacaaaagcaccaaatatgagccatgtgttcttataaaaaagtaagtcttaaaagtttgcaagcagacatatgaggtacaacaattagtctctattcacctggagcaacagaggaagagggagagtcgagaatagaaggaagatagggaatatgtggctaattgcctccatgaacaactgcctcttttgccatgagaccagaagaactggatggtgcctgttttcctttactgaacatttgatcaaagatctttagaataatcctgatcaaaagagagacaatgcagaacagcatttaaaaatctcatgaaggctggatgaacccctgaaactactgccctgaagtaatctttaaaccttaaaccaaaaatatcccctgatattttcttaaaaccaaacagtagtttagcttaactactaaagaccatctgccttgcgcacttgctcttttaagatctgtctacatgagattgaactgacaacagtaactcgaaagattagataggaaacttagggggcagtgagtttacatcaatgggggaagaccaattcagaatgggagggtgagaatggttgcacaacttgaagactgtaatcaatgtcactgaattgtacaggtagaaattgttgaactggtttatattctacggtatatattctcgacaatgacaacaaaagaaaataaagtatataaaaaaagaaattaatcacaagtatggccaagtagtcagtgtaatacatctgttaatccttggaaaacgtaaatttccctgagtctatacaatgaaatatgtagtcattaaaatgatgctatagaaaagcatttaaggaatggaaagatgttcatgaaagaacgttaaagcaagtttgaacaatacagtcattcagtcattcaaaaaaaagaacactatgtgggttgtaattaagagaagtgtgacatttagcactgactgaagctccccttgtgtctaagaagttggggggtgggtagaaattggaggtagataaaattttttgcataatgcataagaattgtaacacttcaaagatcttggaaatctcaaatcttactgttctttaatgttcacttttccttggaatcattttgatacaaaatagagattaaaaaccttggctcccacaactggattaatcataatctagtgttcatgacaagttattattgttggactaggcatggctctttttcattaacgtcatttatataatataatggataattgtagaaccattgcccaacccaagggctagaatatttaaaattacttataactacctaccttgcctttcccttctcccatgataaatccactatgataaatcttgttatcatttcttgctttcttctttttcagttttatcacatatatcaccagaatcagttgacattaactctgactccatgtgtgtcagagcagaactgtgctacagagggtttccatggctggttttctagaaatagatcaccaaccctgtcttctgaggagcctctggctggacttcaacttctaacctttcggttagcagccaagtgggttaaccgtttgcaccacccagggactcttcaccacatacataggtatgccttaaaattatcctgcttaatttgcttgtattgagctttataaaaagcgtatcaggctgtgtggattcttctgagacttgctttattcactcaatgttaacttactaagataattccagggagttacgtgtagctgcggtttttccttttcgctgttgcataatcttttattatgtgaatatatcataattttttttttccacattatcctatcaatgaacatttcagttgttttcagatgtctctgcccttacaaactgcctgatgtgaatactctggtccaagcctcctggtactcatatgctagatcatctcaagagcatattcccagggatcggatcagtgggtaaaggagcataaaaatgatcattcttaaaaaacaatgtcgatttttgtcctaggtgattctgacaatttatattcccaaaagaaatgcagaagatatcctgcaatttatgtgccctttaaattaacagaaggcatagtcaaactttttaatttctgtcagtcagaaaggtactacagtatctccatgcagtcttcataaaccttctcctgattactagtcatgtggctattcaccatatattttttctagtctttaaagcggtatatcatgtcttttgtactttttcctatcagatcgttgtcgtcttcttaggattctgtgggagctcactgtagatacgtgacgctaatctcttgccagttttatgtgatgccagtctcttctctcagtttgtagctaggctttttaatttttgttgggatgtccactgatgaacagaagttcttaattttcatgtactttttgtgtttggtttctgatcctcaggtcagaagagttttaaaaagttatgtatctaatttattgttattgctgtacagaaatatcactgggtgcagtaagctgttcgtgctcagctgctaatctaaaggttgatggtttgaacccactcagtggctctgtagaaaaaagtcctggcaaacagcttccgtaaggattacagccaagacaaccttatggagcatttctattctctaacacgtggggtggccatgaatcagaaccgactcaacagcaaccggtttggggattttttttggttatacagcaatgcaagttacttttaaaaatattgaccttatatccagttgccttgttaaacttccctattgtttctagtaatttgctcatagattcctttgagttttctatggacatatcataacatctaaattaacagagggaaacaagtggaataaagaggaaagaaaaacaaaaatgaccaaaagtacagaaacatttgattgcaaaaaaaggaaagactggagataaaggaaatacaggaacatcaaaaatgaacacactaagcacccttcttaaacggttaggagaagaataaggaaacataaccgaacaatgttgaaatgagatggtaaagataagagcagaaatccataaagtggggattgcggaaggagacaatagctaaaactggcacttagaaaaggatttgccaaattcaaaaacctctggcaatgcagattttaaaaactgacaaaggataaataaataatattattaataaaaaagggacataaccacagatacgacagactaaaaagacactaagtgaatacaatcaggctgtttataccaatacacatgaaaacttaaacaaaacggccatattccaccaaaattcatacaatttattaaaacagactatagcctgaaaacttttataactataaatgaagtggaatcctatgcccataaagaaaacatcaggccgagacagatttacaagtgtgttctctcccatattcaattattagatcattcaatttataaaacttcttacaaagaacagaaaaagaggaatactttccattcattccaagaccagcattactttgacagtaaagtacaagaaagcacaagataaagaaatcataagaaaataacattatagacccattttaactcattttattaatgaatattaatgtagaaatcttgagcaagatattaacaaagtaaatttatcagtatatgcagaatataatataacatagctaaattgggtttatcccaaagaaaaacagctggtttaatttttaaaacatgtaagtattattcactaacagattaaaggcaaaaaccacatgatcctcttaatagctacatatacacctttagataaaattcaatatccattcatgataaacaacaatgaccacctcttagtaaaccaaggattataaaagaactttcctagcctgatacagtacatgcaccagaaaatgataaataacaaaatgaaataaaattaaaaaaaaatcgcgacaacaaaccatcatcctaaatggagcaacactgggactatttcctttaacagcagtgagaagagaagattgcctatcatcaccacttgaattcagcaccgattggaggttctttcttttggagacttacatccctttcacagaatctcacactaaccttccctttaaatgtaactctcaaaacaggtgttctaagacccaaagcatagagttttcaaaggcagaattcttcttcccacccccaaaatcattatcaagtttctttttaaaattaacgctcagcagcagagcacattttagtgtcaatttagagaagggaataaaggaaaaacataatttgacatagttataaatctaggagtgttatccaggctaaatatcatctcactctgggaccgaggaattacactcattttgccttttcttcttcaacaaacaaagtatttaaagagctgtgctagtccataattttgttcattttatgattcaactggcattatattgaataacactggtaatttcactgtatcatgcgtgtgaactttgccctccaaggagaactaacgaaacattttatggtactgaaatgacaattttttaaaagagtcttctttttttttttttttccccttttcacttttgagaaaggagccagaaatactagcttactcatgcctactctgaaaattaggtgagttgctagtgaagggaattatttattacaggaccaatgcctttccttcatttgacaaatatctatcagctgtcatctgtgtgccagtcttctaggcactggtgatataatagtgaactaaacaaaccaccgtccttgtgctgcttaaatatctacgacttaggtgttgttcagaaataagcacaagagcaagtccaagagatcctagaataaggatcctctgtgccctctgtagcctggttaagagctctggctgctaatcaaaaggtcggcagttcgaatccaccagccgctcctttgaaaccctatagggcagctctactctgttctatagggtcactatgagttggaattgacacgatggcaacagatttggtttggtttttggtggtgcaatggttaagagctgggctgccaactgaaaggtcggtggtttgaacccacccagctgctcctcaggagaaaacacctggagatctgctaccataaagattacaccataggaagacatatgggacagttctactctgtcctacagggtcctcacgagttagaattgactcaatggcacataacaacaacaacaacatgttcctatatcgagtcccagggtggtgcaaatggttaacactctcaactgctaaccaaaaggctggaggtttgaatccactcaaaggggcctcagaagaaaggtctactggtctacttctgaaaaattagccattgaaaactctacggagcacagttctactctgacttaaacggagttgccctgagtcagaaatgactcgatagcaaccagtttggttttttttttttttttttacacatacttgagctgaaacatgtgggtttgaattctggatgtgccctattgactgtgtgagattgagcaaattacttaacatctctgtgcttcagttctttcatctgtaaaagaggggccactatagcatctatcttatagggttatttagagaattacaaaagttactaatcataaagcatttagaatagtgtttggcaagtagtaatggctatgtaaaggtagctattattagatgataatcttcaaaatgaaaaaagtaatgcactataaagactcaaaccatataggacctatattattcattttcaaacaaaatattcaagtttaggactttgaatgccaatgggctagcctgccttgtaagtggtgagcaccctaagtcaatgggggagtctaagcagaggccaaataagcatagggtaaggaggattcattcatcctttcattcatcatttattcattaaacagatatccccttagtgccaggaattacaagggtatggccctaaacaaaacaaatcaaaatccctgttctcatggagcttacaacccagggaaagggaatatagacaagaaagcttctaaatttttttctaacacaaaacctttaggtttttagaaatggcagaagaatcagaaagagagggtcaacttttctgctttttgttattcagccaaggctgcaggacagactcaagtttaagggcagattctgtgactagcaactggcaatcccagcctgtttatcatttgtgtcctgtgctggtcctctactcgcatctcaagtgcactggcacacgtagcttgcaaccactgccagttggcaccatcttgattttataaattactctcataaaatctcatgactttctcttctgttaactggctttggggggagactggcattcatggcaaatcactgcactcttctgaccacctccctctgttcatgcccctattcactcactcatcccaaagagaaactcttgtctcccttttgttcacccaaacctgattctccaaggctcccctcagttggccctccaggaagacaccatgattgcctgctgcattccttctgctcagaaccctgtccatgctcaaccttaagagtcataagccaaccattcatccaggtcttcagtaaacattcagtaagcatgtgtcatgtgctagggattcagtgtaaaagaatgcagtctcttccattaaggaacaagtaggggagaccaaaaaaaaaaaagagttttttcttttttttaggggagacagaggtagataatagcaacttgatggtcagggtaaggccaggatcctatgggatcagagcagagggaataagcccagttctagagttctgactcatctgacatgggggaaaataagacccttgatagtcagtgatgtaaggtcacagaggagttatgggaaagatgaacaggcctgcctggggaagggtctcttaccatattttggggaacttacttatatcatttctcatatgtcaggctggcagggcaaaagctgctgctggtattgttgttaagtgccatcgagttggctccaactcatggagaccttatacataacagagcagaatgttgtcctgtcctgcaccattcttacaattgttaggatattggagccccttgtatcaatccatctcacgagggtttccctcctttctgctgaccctctactttaccaagcatggtttccttttctagtgactgaccttccctgatgacatgttcaatgtaagcaagatgcagcctcaccaccctcgcttctaaagaccatcctggctgtacttcctccaagatagatttgttcattcttccggcagtccctggtgtattcaatattctttgctggtattattagtggttagttaaagtttcttatatcttctttctacaactagaccagaagctatgagtggacataattacgtctcaagcttcctctctattcccaacagctcttaacttagtgacaattcacgatgagtcaccaacaagtactcattgagcccactcataatcatggtcaaaggagagggtttcactctgtttaaatagccttaaatccctctgttgcacattaacttcctttccttgctcatcttctggtctacagtagaggtcctccagaggtaggagacgcacagccacactccaccaatcaccggaatgccccagcaagcaaagggtacgcctttacttgggcatgggtcctctgagcctttttcattaattgggcctgatgaggaaatgactgactagcaaacatgagaacatgcaggtgaagggctcaggctaagcagctaaatccctgtgatggaagagactaaggtctttcagttttattcctttaacaaactggctcctacacagctggccctaaactgactgatcttcctttggctaagttatctctttaaaataaaactgactggggataatagtcattttttttttttttaaaagaaaggtagatccatatatgtggataaaaatctaaagcataaaatactagaaaaaacattttttttaataacctcggaataggaatgtctttctatctacgtccaactaaaagtcatgaaacaaaagatggttaaattcgaccacacaaaaaacagaaagttctgcactgtcgagaacttcatacctgacatcaaaagcaaatgaaaaactggaaaaatatttacagtttctgtcacaaaggaacaatctccctacattttgaagagctcttagaagctgtgatggaaagactaacggtgcaatataaaatcgggcaaaggtcatgaacagatggttcagagacagacatacaaaaaacctttaaacacatctgagcaaaagctctcaacctcactcttagtaagagaagtcaaatttaaaccacactggaaaataatttctgttgtgtcagactggccgaacatagaattttgacctccttctttggaggactaggcatctccgtcactaaaggtggatgcgaaaaatggttcagcttcttcgagatgcgtttactctttgactcactgacccaacaactcctgggaatctattccactgctcctcctagaggactaattacattaacatggtaaagctacacaaacaaaaaaaccaaaccaaaccaattgattctgactcaaggggaccccaggtgtgcagagtagaactgttccgtagggttttcaaggctgtaacctttcagaagcagattgccagtcctttcttctgaggcacctctgggtgggtttggaccaccaacctttcagttagtagttaagcacttaatagtttctaccaccctacaaccacacacgatagctataaaaaagaacaaagagacttacatattgacatggaacaatctccacgaaactgttaagtggaagaaagcaaaacaagatgagaataacgcatataataaacttcctttgtatacccactgttgtcgagttgattccgactcatagcgagcctgtaggacagggtagaactgccccatagagtttccaaggagagcctggtggattcaaactgctgaccttttggttagcagccatagctcttaaccgctacaccacaaaaaaaaaaggaacgtatattaatatttgtttcatttgcacaatggaaaactagaaggatgaacaagagactaataaagacagttaccaataaggtactggagccctggtggtacagtggttaagaacttggctgttaaccaaaaagtcagcagttcaaatccaccagctgctccctggaaaccctacagggcagctctactctgtcctacggggttactatgagttggaatcaattccatggcagtgagttttttggcttttaaaaggggctagaggcacagagataggaaaaagacttgtatattcaaaagaataaaatcaaattttgaaaaattatatctgacgggaagtccaagaacctctccaaacagcagaggctgctcaaacagcatgaagcttcacttccaagtcactgttgcattggttcacagagtgacaggagatcaagcctgggaggatctggaagatgacatctattctgacgcaggcctagagacaggaaggaagacacttgctcaagagcaccaagtgagctacgatccaagaaacctaatttactccacatggtgctacccaaccagagtgctgggtccttctgcacatctcaaagattacatgggacaccaaccgtggtgtaatgaaccatcagcacagcctgaggtcttccctacagatactgactggtaccgtaccctttccttctgagcaatcctgatcaaacgcaggaagacacttggaggaacatcccaggataaaaagcatctaagtgacatattacagcatagcgagggagagacccccaaaaaccaactgaaaaaaaaggtgcaaaagataagggtggaagaaaaaacactttttatgatgcttgcaggggcttcacaaacagatgaggatgctgattgaaaggaagctaaagccaaccactagccttctctctgcctgcacaggatccagagccagcttggccaataacatggaaaggatgctctctccttttctaattaaatttcttaaagagtatgctgacttatttatttatcataaaattcctggtctaattaaaaataggactttactccacccgatctagcctaccatatttccggttcccatgtaattggatctgaaaacaacgatgctgagtgatagcttaggatattgctacttactgtgagaataaataataaggaaagagaatgcagccaggcctgttttgggcaagtttaaatcagttctttctcatatagactgaattttaacaacggattaagataatatgatatttcctttaatgaaattgtttaaccttggctaatttatgagggaagcttaccttggtgaggctttaaataaaaaaaaaaaaatttttttttttttttttttgtctttacattattttggcccacgatgttcaagggctctgtggttccctgatctgctctgctctcctcaaccttaaagtccaggaattgttctttgtctcagcagtgaaaaccaattactgtggagccaacactgactcatgtgcgtcagagcagaactgtgctccatagggttctcggtggctgattttttcagaaatagattgtcaggcctttcttccaaggcacccctgcgtggactggaaacttttggttagcagctgagtgcatgaaccttagctgtttgtttgcatcacccatactcatatttacttagcgctctgaagattcaaagccttttcccatctgttgccgtacctgaactactctgccagacagaaggcaaggtaggcatcatatggcagttggaagtaaagctcagaaaaggctaacacgtccaggatcacgaagccttttaatcacagggccggaggtagaacccaggtgtcctaactcccagttctgggcatctccaacacacccaggccaaacggcccatggctccaggatgttcatagagaggagctgattttgcagttcgctgaacgatgcttgacatttttactggcaaacaccagacttgcaggttaggaacgtgtgcatttggcctttcccccccaaaaaaaaaaaaaaattttttttttttatttgtttaaaatattttattgtgtccttgatgaaagtttacatgtcaagttaggttcccatttgacaattcctatacaaatcattcagtgacattagttacattttccacaatgtgtcaacattttctttaattcaattccggttgttccgtttccattactctagtttcccggcccccttatcttttcatctttcctttagagtaaatgctgacttttcagtctcatatagatggttttgtaagggaacaccatgctcacaggtgacatcctttattttgtgtgagcacagaggacagttttgattcaaggtttaaagagaatctcagggtggtaagtctaagggactcctccagtctcaactggtccaataagtttggattttttaagaatttgagttctgttccacatttttctcccattctatcagggtttgtctattgtggccctatcaggtcaagagtggtagctgggcaccatctagttcctctggtctctgagtagatgaaaccttggcatttcccatttgaaacactgttctctcccaagctcatttgcttggatgtagggcgtatgtgatatttttaggtttttggctggttgaggagggacagtttaagatggcagaatgttaaaaatggtatctttcttcacctttgaagcctggttatgaaacaccctaaatttttagaatacatccatctctttttccccccacacctcagaggtttgtacattgcattctccttttgtgcactgtggtcattacttgtagaaacatttttatcaaatactgagccttttcttttccccagttttcgctctcttcttcaacagagctccttctatttataccattatttttactcctgagatttatgttaatcttccttgtcttaaccagtcagtggtaaaagttcggcaaggggtcccttccaaatgtcactatgtgttttaagccactatgaaactctaaggtccccaaggaaagtcaagcacctgttgactatgtttttctccattttttcatgtaattgcaatttacctacttctctactttaaagtccatgcaggatttctgcctcctcagggcacatgttctttgagagggaccaaaattaaatattaataagagacttaatgcagagcagcctccagtcatctgtgctctgtgttaccacttcagatggtcggtgtcaacctaatacactctgacaaaggcaccaggaacaacagcaccaacagccaagtctgaagggcccagacaggagcatgagattccctttcaaagatccttggaagacccccattttaaccaccaaattaagtccctggaccctggcctggtgcacctgctgggcaggcaggagtgtttggcatatgttggcacaaatatttgatggcttcaccctttcagtgaacattcctgatacccaaaggttaatcttctcttggcttcttcttggcactatcgacattgcgtgctggatgactctttgctgaggggcctgtcctgtgcactgtaagaggtttagcggcatccctggcctctacagatcatctcatataccctgtccctccaaacggtgacaaccaaaaatgtctccgacattgcccaatgtctcctgatgggcaaaatcacgctgactgagggccactgggctagatgatccagtgtgaacacccggaagtatgactcaaatcataggcaaccttggcaaaaaagccatcctcaaccatgctcacaggtctgtaaaagtgtcatgggccttggaggccacttctctgccagtctcccatcaagttacactgccttctgctccttccacacgaggttgaagggacaaactcctgcctgtgatatccacatttccacaaatgaaaccacataaaatcggctgtttacttattgacttttggatctgttgcctggttttcttttcgcctaagcagctaagaattgctaattttcacagcattatggcccatttgctccccaccccatctactccacatcagctaaggatttgtctttgactttcaaactccactttgcaagcccgtgtgtggctgtaacatgtgtgaactcgaggtggtgctgtgttaatggtgggagaggacgtccatcagaagatgacaaactccagggggcatttcttccctccaaaccgtctcattacggtccccagactgggcctccatctcctccatatcccacagtccaatttaattgagcgacggccttgccacgccacactgctcttttgacaggagggtaaactcattctgtccatcatgacatttgctttcttaagggcctcacaacatgcagcttcaataattaaatgcaggtcacatccctgtctccatttccaagcctgtctcaggccacagtgggctctttctgatggttagctcttgaccacgtgatttttagaagctggtggctttttgttttgttttgttactgtgtatggcactgttcccactaatatcctcaaacctcagcacagtgcagatccaatcagaacagctcaaagggctctggattttctgatgatggataaatgatgtcagagagaaatttgagaccctggttctggcaagggtttcagagcagcttcctggccatggtcagtacttcccatttgtcatccaaaaatgtttatgcgaggggatgtgtcccttgtgtttttattgcacgtgtccattcgccttgggctgggaggagcttttcaaaaataaagccaatctttccagtgacctcataagagagaaattccaggagggactaaagataactcctacctgtagcgtccattttaaacaatagatttccctgggggaactgggagtgattatgatgagattggatttcatttaacctaatgctgattttacacattacagagatttgtcatctttaagtaatgtgccagatgaatgtgctagaatagatgcaactttgtgtgaattttctataatacagcaaaatctgattgctctattaatagccaaagtccctggccttgagaaggcagggtggcagcgttttcaaaattcatcatctctgcataattagttgtggatctctaaatattcaagctgaggaattaaccaggagctggagaagctatccttcagcttcccttttaatatcgtcccacagccatcatctgctctgggtttttctaattactgcaaaaccaactgtttttaactcaattgccctggcttttggcaatctgttgaatataatcagcttcaaacaaagaaaatgtatttcttgttcaggaaattggggcttgattcaatgagcatcaccgggggactgtgggaagccagtttgctatgttacctgacccttgcattttgagtctatggggcttgcggcgggagggggccctccttgaaagcgagccccatattgtggggatctatagaccttagtggggttttcctctggagaagtacttttatgaaaaccaatagaaaagaaattttggttcctcactctgagcagccaatggtgtggccttaggcagtacaacgtaatgatttgggtactgtcatggattgaattgtgtcccccccaaaatacgtgtcaacttggttaggtcatgcttcccagtattgtgtggttgtcctccattttgtgattgtaattttatgttgagtggattagggtgggattgtaacaccacccatactcaggtcgcctccctgatccaaggtaaagggagtttccctgcggtgtggcctgcaccaccttttatctttcaagagataaaaggaaagggaagcaagcagagagtgggggacctcataccactaagaaagcagcaccagcagcagagcgcattgtttggacacggggtccctgcgcctgagaagctccttgactaggggaagattgaggacaaagaccttcctccagagccaacagagagagaaagccttcccctggcgccaatgccctgaatttggacttgtaacctactagactgtgagaaaataaatttctctttgttaaaggcattcacttgtggtatttctgttatggcagcactagacgactaagacaggtactttattgtcacctctctcagattatctgtttccagtctgtatgtctgattagaagcatttagggagcagggctgtgtcattaacacactcaaagtgtctggcactggcctggacatagaagaggagttgaataaataaccaaataaaaataattaatacataatatacatttaagggaagccctagtggctcagtggttaagagctcaggctgctaaccaaaaggctggcagttcgaatccaccagctgctccttggaaacgctatgaggcagttctgctctgtcctataaggtcactatgaggcagaatcaactagacggcaacgggtttggtttttttgtttgtttgttttatactttgaataaataaaaaaccaaaataaattactttagaggtcaactctctcccttgcttttattctctttctcaatcctgtttatctacaaaccagttctacctagaggttcccaaagaataaatatcagaagagcaatggttctcagcctttgttcctctctttcagaattcaagggtatgatatactgtcatcaatgagagtggctctctttgacaacaattcccaaattggggggagagggtgtgagaatcaaaccagagagcatgggaccatttaaacaaataacaaaaagggactctgacatgctgccatcagctcccatgaagaatcatcatggtagaataagctaaaattctgttctttgagaaaagctggaaaagcagactttctcaccttctccaagacagccctccaagaaaaaggtatatgctctgggtctttcttcctctggacaaggaaggatttaaatggtagatggatatgagcatgaagaactcaccaaggccttaaccagagctgtgaattcattgcattttcatccgatgcacaggtattaactacctactattttttatgtgctgggcagagccctggtggtacagtggttaagatttcggctgctgaccaaaaggtgggcagtttgaatccaccagctgctccttggaaaccctatgggacagttctactctgtcctgtagggtcgctatgagtcggaatcaactcaacagcagtgggttctggtttatgtgctaggcactgtgcagagcaaataggagaagcattcttgccgctaacaaggaggccaacacacaaagaaacaagtataacatcaagtggcaagtgacagaaatataagtacaaggtgttacaagaaagagtacctgggctttgggtgtggctaatggggagcatctgggaagaccttctggggcaggtaaagtctaaactgaatcttaaaaactaagtaggagttaggtgaaaggttagagaagaagagcaatgatatgaaaactgttcaagggaggcaagacaatacaggtaaaggcagagaggactcgagcaccacggcgtgtgcaggaagaacaggcgttttgatcacgtatgaagtttaagacaggaaatggaaaaagatgaggctggagaggcaataccaagaagccaacaggaggagatgggattttgtgttggagtggtggagaaccctagaagatttaagcagagggaagtgatggaattttgcatttcagggcaggcacattggtggccatgcagatgacgcattgagggagatgagactggcagcacgttgactggggcaaggagccaaggccatcagtgtgaggtagaggagctggggaaggcagaagatttgagagatatctgggaggggaagtcagcagaactttgggacagccagtacgtggaggatgacagaaggaggagtcaaggaaactcctagtctgatagtttgtgttcctaaaagggtggcaatgccatcagttcagacagacaacctgggaggcagagcagatttctagagtgataaaagggaggtttccgtttgggattgctgcccttgaggtacttggcagggctgatgatatggtgggcggcaaggtagataaatcagaagcttaggggagaggtctacccttagacatgatgatttcactttgtaccaaccaggcccagtgggctcagctgggggtgaggctccccttcctctctccatccacagactggggcctcaatgctgcagttccattctgaagtcctgcatggggtcttccctcatcctatattcttccacaggtctgctctctctccccttcaccttcccaccatcgcaccctgctcacatgtctctgaggctcgccagcaggaaagggcagcagtgtttgttacgccccgcttggaaaattagagtgggcagctctgtggaaacaaagccacaacatgacttctgtcacctacctcacctgctgggcctcctccccagctcctaaatcctgcttccgctgctgatgtcatactaacaacctggactttttacacatttttcaaagtcaagctaaagaaacccaccttgaaagaaaaaaacgtgtatttactttagtgttttattagccagttagccgggctttggaaaggagggttcttccacacatttggcgtgacgcaaagcagcaaggaggcatatggaagcgctggatgtggggccacaggccactctggatcctctctctcccttcctgatctcatctcgacccttggctataatgccatccatatgctgatgatactcaagcttgtatctccagaactgctctgctctgctgagctccagactcacacagccaactgctcacccaccatctccaccacttgcttgtttaatgtgcatctcaagcttcacatgtccaaactgaactcctggtctgcttccccaaacctcaatcccagtcttctccatttcaggtaacagcaactctatccccgccaggtcccaaacctcagtgttgtgtcattctcaactctgcttttcctttctcccccacctccaacctgtcagtgcatcctgctgtgttttcaactagatctggaattggaccattcctactctctgcattggccaataaggtagacactagctacatgtggctattcatatttaaattaatattaaataaaattaaatacaactcaaaaaataaaaacagagaggaatggctcaagtgagaaatcttgggaaaatagctgcaaaattaattaaaaaattcagttcttcggtcgcactagctacatttcaagtgtttaatagccacatgtggctagtgactatggtattgaaaaatgtagctacagaacacttccatccttgcagaaagttctattagacagttgagcttattacttttactgctaccaccctggtccaagccactgccatctcttgctcagatgattgcaatcgcctctaagctgatgttgcttctttggtctccacaacgcagcagccagagcaatccttttcacacagggcaggccatgtcactcctctgctcaaagctgtcctctcaaaaagtaaaagcaaagtcctcacaatggctcacaaggctctacaggctttggcccctttcacttactggcctcatcccctcacagtcttccacttgctccttttgctgagccacactggcctcctggctgctctttgatcatgccaggcacatccctgactcaaggcttctaccctggctgttccctctacctggaatgccctccgccagatatcctcctggcccactccttcccctccttcaaatctctgctcaaacatcaccttctcaaagagccttattccaacaactctatctaaatctaacctccaccctccccaccttcgcccctcacactcctgctctccctgacgccatctgctttgtcgttttccatagcacttatctccttggaagaaactacatatgcttccttgttttttgatatccattgtttattgtctggcaggactctttgtccatttgatgtatcctaagcagtgggaacagctgggctgggagaggcattcaactactatttgttcaataaatgaaggaataacgtcttagggctggaaaccaaaccaaaacctgttgccaccgagttgattccgactcatagcaaccctataggacagagtagtactatcccatagggtttccaaggagcgtctgatagattcaaactgcgaaccttttgattagcagcctgagctcttaactactgtgccgccagggctcctagagctgggaaggggccctggaaatcgttcttgggtggggtagctgagggcagcgatatgaggctattcatctgtaggcccaagggaaaaggttggactaggagcctggtctggtcctaggagtcttcactgggcaagccccaaggtgatgacatcccttcaccttcacctgccatgattgggactctgatgaaccacagaaggccaatgaggacaacaaagtaattaaatgtcaagggcattcaccatttttcttcttggtaagactttgtgtgacttaaccacctgtcctgctcctctgataacttgtaagaagcaaggaaaacagtgatggcttcagactactgggcaactcttacatgccagtcttaacccctcaattcttgcaaataccaagaatctttgaaaattggaaacatacaatttacattacatttttttctaaagcaatgtatcagccttgttttaaaaagaaaatcatggcttcatcatataatttaggaatcagcattagaaaaagtcaactagtatgaaaggaatgattctccattggctcaataaaatatttctgacattctagaatggatcaaaaggaaagcagactccagaccaccttctgtgttaggggtttttctattctttcgtatctataaggaaatgccatcagaatagacatatttttaaatgcctcggaacgatggtttttctactgccaattctgattcaaagaaaaatacagtgagggagtgtcaacctcatacgcagacctgctcagaatggcagggctgccaggtccggagccacagagcaagacgttaacaaagagccttgaaagctcggtccagagctcacaggacgatttaacttgccaaagcatgtgattaagttatcatagtcattccttcattaccaagataacccaactggagacttttttggaaatgccagatttggaaataaaattcttacggattgcactgccacgtcatgaagattataccagaaaacaaatgatccgcacagacgatcttctgtaccaaccagaaaattagatgtcaggaaagagaggctaagatataagatagaatggggtggggtaggggtgggggggtacagagcacaatgaatggtatcatcagcagcttcccagaaagcgaggcacctgaatgtccagggtgctcactgggtattaccttgggtggcgctcttcattgctttcactaattttccccttccagctccaaaaccattatttccatagtccgggtcactgtcactaccactgccacggctggcagagtacacacacattctgggtaccttgtcctaaatgggtaatatgagaccattaacattattcatgcacgttgaggtggggcggaacaccctgtgaggatgtgaaacatttcagacttggctctcgctgcacgcaccgccaaactgtcttcccattgcccagcccctcccagaagaacaagtctgctttgtcaatctgtctgtctgactcggagctggagtagtctagttaattaccagagctggggaaacggccccgcaataatgaagccgtcgactgcactctgctgttgtgccaggccccgtaacgtccccacagttaccagttctgcattttgcttccgtctttacagggtcttatttttcttgagtgctttttatgattgctgttccaagactaatggcctgtctatttaactgatctcatcagtggctttcaagtagcagaggctctaaaaaaatcaaccttgggaggaaaagaataaatgtttgcctaatttataactttctttcagcccccaaaaggacagcagccttaggaaagtaagccagtgacgacctctgtaatcccctaatttgctggtggttcatgggtcaagggactcagcttcccctcttgctcaagcgcacacacagcctgaccctggaggatgatgctggtgtggccgtaatggcaggtttacaaatgtctgtggcggctgatagtctatcaacagtgtttccttctgtgcacacaggcagatgactagatttaggactgcaatgcctatgtattgaattgggggtgtctgggaccctctttcatgttttcagactgtccccttagagtctattactcgccacccatgccagcggttcacatacatacagatgggatgggttcccagggtttgtctggaggcagtcatattgtcagggattataaaaacacacctaatgatgtaaactcccttggttggcattatactttcaagcagtcactcattccctttattcctttacttactcattcacccactgaacagatatttattgagtactctgtcctatagggtcgctatgagttggaattgactcaatggcagtgggtttttgtttttgtttttattctgtgctgatcactgtgcggggttttggcgatacagcatttaatataacagatgcaggtattggggattatgtaggaggggaaatgacgagaaggaccacaaggtctactgactgtggctccaggtaaccctgtgtctagtgtaccaacaggattccagtaacaatttctgggtgtactaaggtgcagtctttcacccctccattcagcaaacactaattgaagcaggtgctgtgctggatcccagaaatatacaactattgctgcaaaccttccctaccttgcagtcagcaaagcagggttccacgtcaccagcggtggcccttacaagttggggcagactttccaagtgggtgaagctggtgcagaatgatcacgaacgggtcccctgagggaatatgtatgtaggtatctgtgtatgttgtgtggggagtgcctgccatcgcacagagaggggacagggctctaccccggccagcgtgggaagccctctttttttccttaactttctaggaatggctttcctcctctttgctactgtcaccacctgctatttttaatgcttttccttctccaacactgggtatctgttagggtttttgcaactttccagtccccaaagcacagagtcctctggacaaggactttggtttttacagtgtgttctgttgaccaagcaacatcagtatcagctgggagcttgttagaaatatttggaggagggggcagcaagatgtgttttaccaagtccttcaggtgattctgatgcccactaactctgggaaccactgccttggaggagtcctaaaacttttatgtctgacttaaggcatggtagaatacagtgatgtcccccttggcctctcagacccatgttctgtagaagcagctattctgagtgctggatgtggaacccagagggctgagtcctaggttcggccccatggtaactttcccttggatcctgggcacaggccagcttccttctggaagttggtgtcctcctctgtaagatgacgctgtgggcccagagtacctctaacctgactcctccagggtcccatgtccatactgaggtggtaaaggctgaaagaaggctcagccacaccaggtgtgggggacgtgagatgtaggctagcctgaatgtttcctcatcatagttggacagagactctagtaaaaatagggatgggggctcctgatgccaggatggaattactgaagggaggaaaagtgggaggggtaaacgaaggatgggcagctctgtgactgagccacacttccttcctcccaccccactcattgccagcatcaccaagaccctgcagggggtcagccccaggatgagctgaggaagagtgaacaggctgaacatggtccaagtaacaaactgtgaggggtaaatggaaagaagcttagagggagccccaagtagcccctgggggtgggtgagcgaagaattgctgggccacaagctcctccccaggtctagtcagatgccaggaggcctctgtgtgggcggaggaggatcccatagcaaaaatgatggggattcaagaaacgaggtctcactgagcctagcaagtcacttgaccactccaggcctcagtttattcatccctaaaaggggtaaaattacacctgctttaccagtctcataggggcaaggtaaaggttaagctaaatgatgagataattctacaatctttctacacagtatcctgtggcttgggagagtgaatgctgctccacagtgtctaatcgggggacagcatctacacctaaataacctggatatagaccagaggaagcactctgaattcctcagcataaaagggtcccagaacccacagtgttacttaataattctttgcttttactcaatgaatcaacatcaaatttgatttagaatcacatctctcacaaaagtgttgtacgaatttcacttttcacaaccaggaccaaaaggggtatggcttcctcccctcagtttgtcccttacctgggtctcagcagcggcgtcttcaccaccccagtctggctcactagccattgtggtttcagcatattcgaatgacgggcaagtctgaggccttggctctgcttcgttctgcttttgggaagtgagttttcctacaggaggaaaggtacatgaagtcacagaccagctttcaacaacgcttcacaagtttagggagggagggggggaaatggttccaaaataataaaaaggtccaaatatggtgacaggtgggtttccctgggcactctgccactggtaagtctgtgttatctgaagcagctgcacaattacatgtatctctagaggatgaccaccatggtgactcttaagtaaattgtcctccggccacttttccaaaaaatgttaatagacttttcatgttggattcagtaagcaaaccatttgggaaatactcaggttatttctcaaataatgttattcatcaaataacaaataggtttctttttttggaggacttctcagagccttcaatgtgccaaaagggctattgtcatagtttccaaaaggagggttagaattcacagtttttcccaaacagacttgagcagggaactcttattttcctacaatatctactaacatctttttgaatagtgcagtttgatgaagtgttgccctcaggtctttaaagatcttataaaaccaaaccaaacctgttgccatcgagtcgattccaactcacagcgaacctacaggacagagtagaactgccccacagagtttccaaggagcgcctggtagatttgaactgccaacctttggttagcagccaagctctgaactactttaccactagggctccttagagggtactgcaaacagttaacttgctcagctgctaatccaaaggctggaggttcaagtccacccagaggcacttcagaaggaagtctttgtgatttacttccccaaagtcagccattaaaaactctgtggagaacagttctactctgacatctatggggtcgtcatgagtgggaatgacaactggcggagtttttaaaatgcagattctgattcagttggtctgtgtcaggatctgagattttggatttctgacgagctcccaggcgatgctggtgatgctggcatatggaccacacttccagcagcaagggtataataaggcctcctcaattagcacagcactattaaagaaagttcctccattcctgataataccgattaacctgcacagtgccttccttcctcatgcgagacaggagaattgctgcattatcctccagcctcagtgactatcaacaggacaagccgtgacagtctctcaacagcattttgtggtgtcagcagaagctaagtaactgttttcatcagcactgaggggtgtatacaattgcttccattttttttatacagggggtaaaagaaaaaccaattaaaatgcatacgttaagcaggaagtgactgctctaaagaggatctgaccctattttccttttgtcccggtctattctccatcccctaatttttcttttttttttctctttcattgtactttagatgaaggtttatagaacaaactagtttctcatcaaacagttagtatacacattgttctatgacattggttaacaaccccacgacacgtcaatgctctctcttctcaatcctgggttccctattaccagctttcctattccctcctgccttccagtccctgccccagggctggtgagcccctttagcctcgttttgttccatgggcctgttcaatctttcatcccctagtttttcaaaggagtccctaatggccacaaagaaaagagaagtcttggaaagctggtggcccctacctctgaaccacagtgatggtaccacccggtggaccagaagctccagggtgggtggcacatttaaaaatgccctgaagtctgttgacatcactctttactgtatactacgtttttcaactattcatgacaatttaattaagacccacaccttcgaaaacaggggcagtgaatccgagcagcaaggcctgaacaatctccttcctatcctcttcttatgaagcaattcaaggctcacggtttccattcaatttgttataatgacagtgtttaatcatggagtctgctcggcagcccgccgctgaattgaggtcacacatgtggctattcaggcatgcagcacacagtctataactcagatttcgcccctgaatccctggcggctgtgtcattaattaacaatgcatttagttcaaaaataatatgcgttgccgtcttttaaaatgtagccttggcttggaatgagccgaagtttgcaatgaaacgtttgtagtatttggtattcctgagtgaaggaagaactcaaccatgggaatagcccgatcccatttattcaaagatatttaattaaaagtctccttttctcatttctcagaagcctgtaatatagtctctacttgcagctcctttccgatcatcatatcataaatgaaagcctgcaatttagagttctatttcaaatgcttaagcacattgtaaatgcaacataggccgcacaagttaaaaattatttagtgccattctgggctgcaacaaatatttttaatctttagggagcaatgaaacaactttgacccttaccctggccctatctgtaatcatgaaagcttgcttcaattgaccgtgacaaacaacggtctttctcagtgggaagggctgctccacgctcctgcaggtgacgcacagtctactctgacatatcaaaccaagtctcttataaacatgtttgaacgggatagaaattcgtcacatgacatgtttctggctagagtgcaaatagtattttagctatatttacgtcttgggcctaaattggtctatattcagagttaagctttaaaaggtaatgtaggtttgtgtggtctttttctcaatcaatttatatatccgtctgctggtgcttacacgtttgtcttctttctgtgtgtgtccatgtcttaatgcaatcctgcaggtgatgtttaatacatgccattttgctttttggttgggcatgggcagggcttgccactcatcagcatttctatcctgcaggggccctgacttgctcacctactggggagctgcctgttttccgttatgtgtcagcaactgtgtgattgtgggtgggaaagcaagcaaatttgaaaggtaattggtgttttacctgaggaggctggtttggggaggcagctctgaagaggtcgttcccctctggcggtcataatggggtcggatatggaatgaacaatggcgatacccgcagagccctggctgtctgcagaggaaggcacttctcggtcaagggtttgggctctgatggaagaagctgaagaaagtgctggctggagagacaggacgggctcagtgtcctctggggagtctggtttgcatgtgtaccggcctgctgagcgatttcctgagtctggcagtgggaaggttccgatgccactgtccagggttctcatctggcagctcgattctgagacagagtaacagagtgaggattagagaacgctgacctacaaggatcacgggtatctgggtatgacctcagggcaaggagacatctcaaaggaagagtttaagagaaagaaaaatgataaacatttggaaattgtattagtggtatcgtaaatttctagtgaagtctatgaaatggacatttaattgaacatgaaaatgctccctatgaagtgagaaggccagcccattacaggctgcaacagtcccaggtacataacacgctggatggttctcaagtgttgtagtagaaaaggaacactcattagagatgaaaaatcatttctgattactcttatttcaatccggagccttggtggagcagttgttaagtgctccctgctaactgaaaggttggtagtttgagcctaccagctgctccatggaagaaagatgcagcagtctgcttctgtaaagattacagccctggaaaccatatggggcagttctattctgtcctatagggtcactctgagtcagaattgactcaacggcaatgggtttggcttggctttttctttcaatctatgaaccatatgacttcagccaattaggtgaaatttattacttgaaataagatgagtaatgaacgcaaataacaaattgaagagacatgctaacaaaggtaattgtatatctcttgcaggaattatcatccattgagcagttaactgaatctctgggctctcaatttgcctgtcaggaaaagaaattcacgtgctctaagggtcatcccagagagtacctcacccactgtaacatcacttatcttcagtgcttcatttgatccaactgccatttgaggacttcatgagaaagtacagaaccactttctgtctttcacacttactttatataatgacaaaactcattaataccctttggatttcttgtcactcaccaggaccccacttttcctagaacaaaatacactgattttactatgtgtgtggcatattttgctaattatgtctcatcttcaaaacaaattttatatacagagaaaaacacaatagctgaagaaattaatagatacttaacttctaagacggtggttcggtttacccaagccaatgagacagcttccaagatcttgctgcctcctgttcatatgataatcttgggatgaaccagccttagtaaaatttatatcaacatcttattaagtctaggactatgtaacaggcacaactcagtgctatgttaggtatgctggggaatacaatagaatgtgacataatctttgtgtcaagaggctccacagctaaagtttctttggtgctttatgaaatagtggctcagagtgtggtctctaccagtaactacccatgtgaccctgcaaaagatccttaagctcttggggtctcaggtcccttatagggttgctctgaggattaaaatacattcactgtcaaagccctagaacttcaaatgatgccgaaagaatgaatggtgacatgtacaaagtgtttagtatacatagtagatattagtagatatcttgtaggtaaataatttacaaataaatatgtttcatacacaatctcatttggtcctaagaaattagtaaccaaactttagaatctgcccattcttccaccttcccctggaaaaccagtttgctgtgaggagtagaattttgggaaccctggtggtgtagtggttaagtgctactgctgctaaccaaaggctcagcagttcaaatccaccaggcactccttggaaactcaatggggcagttctcgtctgtcctatggggtcactatgagttggaatcgactcgacagcaccgggtttggttttggttttggttttggtatgataaaacaagggagtgggtggggacaaagtccacttttctaggttcttgttggtttggtattttgtttttcaagaagtaggaagattaagtctctaataaaagagaggattcggtccccaaaaggatgtttggtaggaagaagcaggtcacccttcaccatctcatatactgtcagctctcagggatgggtcatagaccatggtctgagtgatgcttttcctttccaggactacaaggagctaagttttagcccccattcatctcaggacctccaccttgtcagctttactctcaactggcctgtggtgctgtggatcacttttctatggcctttctacccgtggtcttgtaactttcacccaagtgattgagcaggactgtgcagatatggtaattgtggtccaccaaaaggactggtcagttttgccatcttgctgggcttgaaatgagccaccccagaggcgggaaagagaagagcccaccaccaccaagaaaggagagaccagcaggagacacccgcaggagacggtatagtgggcttcccagcccacagatcaagaaagctgagtgcctttgggcagagactgagggcctgcaggcatggctggaaagtggcagtcctaatggaagaactatatccttgaatgctcctgagcctgaattataacctgttatttccctaataaaccccataattgtattgtctgtgagtgttgcgtggccattgcaatgaattagcaaacccagcagaaaagtagagagtgctgtgggaggaatggctggtgtcagaattggtaaagatggtggagagaggaggcttgtctgaccccaccttacaggaatcagccttgggctattgatcttaattctccttcctcctcgtaaagttagaagaggtcagacactgcctccatgcctttttttcacacagcctcacagattattcatgatcttctctattcatttttgagaaacagtggccttgtgggaaatgatcagctgtttgcatggagaggctcttccagaagtgtgtaaaaagaaagactgctactcagattcagagtcctttcttcgttttagcctagatatacaacaatctttggatctagcatgtccacacgctgtacttgggcaattctcaattgtatgaaatatttcagtcccacacaggagtaagtacatcttcatcagaacccacccagtctttggggatgggaatcaatgatcgtgggatgtaacagctgagaagtgttataggtcctacatgcccagggctgccagccataagaccttactcccagcatcctcagttctctctagtcctgaagcaaagggtgctcagcatggggctttttccccgtttagtgaagatggtttgtcaaaactgtgacagcttatcatagctaccaaaggtccctgagtggcacaaattgttggccctcggctactaactgaaaagttggaagtctgaacctaaccagtggcaccatggaacaaaggcctggtgatcttctcccattaaagatcacagccaagaaaaccctatgaagcagttctgctctgtaacacatggggtcgccatgagtcggaacagactcaacggcaacaagtttattacagctactggacttcctgggtggtacaaatgattaatatgcttggctgctaatcaaaaggttggagatttgtgtccacccagaggtaccttaaaagaaatacttggcaatctacttcaagaaaaatcagccattgaaaacctataagcacagttctactctggcacacatggggtcaccacgagtcagaatcagcttgatggtaactggttttagtttattaccgctactaggagttcactgcttcctttgtatcatcacttttaatcttcacaaaaaccgtataaagtaagaactactattgctatttcacaaacagatacatcatgttcaaagaagttaaatgacttgctcaagtcgtatgctataaagagtctggctttgaattcaggcttgtttaacttaaagaccatgctcttagccaccaagctatactgatccccccaaaaagcacagctaaatttcagaagtgggatctgtgcaggtaagagttactgaggcgaccatgtgagaaggctcatagcatggccccctgctcctactcagggttccagttcctcctctgggattggctctaagccctgaattctagctggttcctgctcttccacattctgtggttgaaggctatggtccaaatccctggcaggtctctgcagttgctgagaaccacaattacctagaaagctcttcccttcgtcttcttggactggctccttagacttccatgccggtgttgttctagagtttacgtcgcctccctgggcttggcaacgggcactgcttccaggggaaatgttttcctggctttgtgtaaaaactctcttgcctccacatattttatggctcaagcctcagtgagcactgaatccagtcccttcaaatggagattcaaagagcaaagtgagcttcttagctgctcttcagtgatcatcagcagatagcccccaggcaccaatgcctgtgtatgttggcagagtccaaggctttggggcagttgcaagaaatagggcagagtggaggtctgaggcaggaataatggtgacaaagctgcagtgtatctggtgttcttctgagggcaccaacatttcctggcttccatccccttaaattattttcctttcccttcaacacacaatattgtcatactggaatctataaaataggtatttgtgacatctctggctgagatttgtgtgcactgacattaagctcagaaaccacttgctattaaggtcattttttatttctaaaaaattacagatgccaaatctgtagtaaatgtgaaggactcgcttataagtacctatgaaatgaagtgtggacagtcaagggcttagatgctgagtttcaccctcaagtcaatttcttgagaacacataaagctttggaaatgggagtttatatggaaaatgctgacaccgcctttgtgtagtttctttaagccactattagtttcatgcagttcacaaaaacattctaacttgaaaaaatgttggatattgtgcttctaaagccagctgcccgcctccccccacccccgcccttgggaattataaagactcatgaaataattaaatggacatggtaggaacaaagttcaaaggagcacgtctgccttgcatcttgaatgagttgacttgaacttgatctaagttcacatttgtggctgttagctgccaacagggccttgctaataagttcaagggttggatctctatatggactagctggatccattcttccaaggtcaccaattatatctctgaccctggccaaccctctctcctacttcccattgtcccatttgccttctctctctccaggtaagttctctcacttaccaccaccagcaagggccagacattttgtgggatgacttacagcagtgtttcccagtccttttaaagtcgtggcacacagagaaaacacatggcttactggggcaaacactggccacccatttgggacacattagcagcagaatggtgggaaactttctatttacgatggcctcaatggtgatcttcttttactgagaacttaaatacactgctctgcatatttttggcattcaaggagatggatgccttttcagtctcttagcagcagatacaggcatttttataaggctctttttttgggggggtggagaagaatgtcaagattcttcagttgggaatattgcctggaatcaagccttcagaaaagagggtggttgctgtgtctaagagggagatgagcagccagtgagagtgagattctgcatgcgatggtggcagagaagaaaacactggagaaacttttccactgaggatatttaaactgatgacttagggtgtgtgatataaaatccctactcatctcaccaatgagtttagccctcctgctccctgcatctctctgccttggcaggtggcctcggtttcatctgaaaattagatcttatcttcaccctaggggcagtggtggttcagtggtagaattcttgccttccatgtgggaaactctggttcaattcctcatcaatgtaactcatatgaagccaccacctgtctgtcagtggaggcttgtgtgttgctatggtgccgaacaggtttcagtggagcttccaggctgacagactacaaagaaagacctggtaatttacttctgaaagtcagccactaaaaaccatacggatcacaactgtcctatctattgtgttcatatggagttgctatgaaggccaactcaatagcaggtaataacaacaacatcttcatcctaggagcgctttgaggctctgaggactagtaacaaaatctgtgataaacacagtacaatgcctggagcaggtacacaacagttattattttttaaaaaatggcagctattctcaaaataagtattactaggtgataagcctcctaggctgcagaagaatgaacaaatatgtcttgggaagaagtacagccagaatgctacttagaagcgaggatggcaagacttcatctcatgtactttggacatgttatcaggagggaccagtccctggagaaagacattacacttgggaaagtagaaggtcagcaaaaaagaggaagaccctcaatgagatggattgacacagtggctacaacagtgggcttcagcgtagcaacaactgtgaggatagcgcaggactgggcagtgttttgttgtacacagggtcgctatgagtgaaaaatgtcttgagggcacataacaacaatgacaagcctcttggagcagagctggatttattcattgtcatggattgaattgtgtcccctcataatatgtgttatcaacttggctaggccatgattcccatgactgtccattattttgtcatctgctgtggttttcctatgtgttgtatgcagtggattagcagcagttatgttgataagatctacaagattagattgtgtttttttaaacaatctcttttgagatataaaagagagaagtgagcagagagacagggggacctcataccactaagaaacaagagccaggagaagaatgcatcctttggactcggggtccctgtgctgagaagctcctcagcttcgggaagatagacgacaaggaccttcctccagagccaacagagagagaaaaccttcccccggagatgacaccctgagcttggacctgcagcctcctagactatgagagaacaaatttctctttgttaaagccagccacttgtggtatttgttatagcagcactagataactaagagattcgtcctctcagtactcccaaataagcctgttcatgctattgtatggtagttatatgcactagactgatagaacgccttgcaggggtcttattcattttcaatcaccattacttagcgcagtgtctgatacattgtccgctgtcattgatgtttaatgaatgaatgggtggatgaagaaacagctctaatctttagaaagtttttcctcctattaaattgaatgtcaatctttccttttgaaatctgaatctccttctttctgttctgactccagcaaccaaggaaaatagctgacttccttcttctctgtagctaattttcacattcagccagacttcattaattcaaatggccagagggataaactcattcagaatattttaaagattgatttcttaatattttcaagctcttagaacaagagttagtaaccaagacaaatgatggccagtggaatgcctctttagctggctacccagtctcctccctctcctctttgtattactctgggtgaaggtcccagatctagcccctcaccctcaggaattctagatgaagtcacccatgctgagtactggtatcctatttaacactagcacccttcatagtatccaaactaagtccttactgagtcacgttcctcagggccatttataataggtagatgaggttactcagtaatgttctgtatgtatttatacaaaacaacgagctgctcactattaaaacaattttttctcttcactaggtttactatgcttcctccaaacttgcttgcactatttcttcacatagcaacgtcatctttataaatatctgcaaagggaaaagtttattttcagcatgatctcacacacacacacttgttgccgtcaaatcgattccaactcatagcgactctataggacagagtagaactgccctatgcatagcgtttccaaggagcagctggtggattcgaactgctgaccttttggttagcagttgagctcttaaccactgtgctaccagggttccacatgatctcagttaatacaaatttccctgtgaattagcagggatttagggatgtttgaaaatgccagtcatcaagtaacttgttcctagtattttcttctacggattacagtgtctcaaatttttcccgacagatctcatttcacatatctttattgtttggatttgtaaactgtgactcttggtattattaatgtaactatccaaagagattattgtaggataacaacaacaacaacaacaaaaaacccaaacccagtgccgttgagtcgattccaactcatagcgaccctataggacagagtagaactgccccatagagtttccaaggagcgcctggtagattcaaactgcagaccttttggttagaagctgtagcatgtaggataggcctaagaaaatatgactttagttctaaaatacactgcatgttcagagtgatgaatgaaaagagcatggcttcacagttggaaagattaagttgaaagacctgcttggctacctgtcactgtgtgacaacatgtgatttttcttaaccattctgacttcaagcaattagagatcattttcagtaagcctggcacaatgctcatcacaaagcaggtgctcagtatgcgtttggaagtggtggtcacagagaggtgaggacccctgtaggtaccttatgcatacactgtgaaggatttcaggaaaccaaactttcacctgtgcagctagtgttatactgcaacatttgggttgttattgttattgtggttaggtgccgtcaagttggtttgactcatagcgagctggtgcacaacagaacaaaacattgcttggtcctgcaccatcctcataattgttgttatgtttaagcccattgttgctgccactgtgtcaatccatctcattgagggtctggctcttttttgctgagtccctacttcaccaagcatgatatacttctccaaggactggttcctctggataatatgtccaaagtaagctagatgaagtctgccatccttgcttctaaggagtatctggctgtacttcatctaagacagatttgttcgttcttctggcagtccatggccatattcttcacccaacactgtaattcaaatatgacaatccttctttggtcttcctttttcattgtccagcttttgcatgcatatgaggtgactgaaaatactagggcatgggtcaggtgcaccttagtcgtcaaagtgatatctttgctttttaatattttaaagaggtcttttgcagcagatttgcccaatgcaatatatcatttggtcttgactgctgcttccatggatgttgattgtggatccaagtaaaacgaaacccttgacaacttcaatcttttctccatttatcttgatgttgcttattggtacagtcatgaggatttttgttttatgttgaagtgtaatccatggtaaaggctgtagtctttggtctttatcagtaaatgcttcaagtcatctttactttcagcaagcaaggttgtatcatctgcatattgcaggttgttaatgagcattcctccaatcctggtgtcacgttcttcttcatacagtccagcttctcggattatttgctcagcatacaaattaaccaagtatggtgaaaggatacaatcctgacacacaccttttccaattttaaaccatgcagtaaccccttgttctgttcaaatgactgcctcttggtctaagtacaggttccacatgagcactattaagttttctggaattcccattctacggcacctgggtgccttttagtaaataactatcttggttacttcctaagcaactaccttttgacaaacatttccttggggattaattgatcaaaagaattaataggcaaccaatgaatatggaaaagagtactggaagctggttgaaggctgcctcgtgtgtagaaaggatggaatccattaccttgagaaatccattttaaggctgggaccttgaaaggcttttttaaaggtctaaacacatgatgtttactgatgcttctttgttcacagacttattacaatctcagggaaaattcccaaatctgcaagccataattttcagtaagaaaaggtacaccatatctatcctaaaaggttatacttgtttccgggcattgatctaccccctctatggatttaaaaaaaaaaaaagagtaattgcaagcttttttcctctttgaccctcacaaatcctaggaaaatatgaaactttaaaatccagcctgtctcttaccttcagaactttcactttatccacaaaatttcaacaaaatttgcagtgaggtcacaacacaattcaccagccagaaacagagcgactggtaggtgtttaatatttgcaccatattattaactggcatgctgtccttaatgcaagtggccatgtaaataagtcttggtacgagttctgtccaggttcctaaacatcttaaagctacatgtggtattggcaacaggaacgtaaactacagatgggagaacagatctctttatttgcacatcctcctcttcatctctacggctaaaacaagccaaaaacaaatttaagcctgtttccaaagccacatcaattaaatgtaggttattcattctaagtttaccctgtcggttttgtcaaagtactcaaaaatggttatattggttattcacaaccattgggtaactgttggctgtggcattaagatgactttctaaattcagtttgatggctttggaatgcatgggaataccaaaccactatgttcaaactggatttacgctttctgagatttgaaatatatgtgggaaatgtaaatttgtttgccaatcacttgcgctctcttttatacagaggaaggcagtggtattgggggtctcatgttctgctacatagggactgaacatgaaaaaaatgtagggaattaataggagaaaaaaaattacaaagaaaaaaaactgaaacatgaaactcctctgtaaagacagaggacaatttaagccaatataggaagtgctacctcagactgggttggtatccagtgaccccgatattgtggtaggatcttatgaatcctgtcttgaaaaacaatggccaacattgtatgtaatattttccatgatatgcaagagtaggctaatgtgatcactacaacttaatgtccagcatttgtcttagttggaaagctgacctggcagtagacttggattgcgggctcctaggtcctattttagaagtcagcacttctggctcaaagcacttgtttattgaagtacaatatggaaccctctctgtccccacaaggcagtgattacaacttgaccactttcctatacacacgtcttatcctccatagtttgacgttttcctaactgggaaataaaaacaaaaacaaacagcaacaacaacaatctaacgttcattagccaaaccttttagagtacatttacaaaaatagggaattacaatggaccggcactgatcactgatcactgtttttctaactgaaggaaggccagcttctctcctctttttgttccctgttacccttacccattctccatccataacaaaattactctgtcctcaacatgttttcttccaatctaattataatttagctatttgttgttttttgtgtcttttaattcacttttaggccagtacttatgaaaggcattttaaaggtctaaacaaacactgtttactgattctcttgtgttcacaggctcactactttcttggatcatatttccaaattaataagttataatttccccttaaagaaggtacagtccatctaacctaaaaggttgtacttgtttctgttcaatgatctaccttctcttatagactcactccatctctacctgtcctgccaaaatgaagcaaaaagatgaacaattatgtggtgaatctgatagacacagatggcaattatggataattctgtctctctagatctcttttactccgcatcaggcttgctgaattatagtgacaactacctttgctgaccatttcactagactggataacatctgctttgataagacacatggaaagaggatgaaagaaaataaactgggggtgagggactgaaggaagagattcaaatagttttatttggcaagacgcatataaaaaacagagatgcttggggagtttcaatcttaccagtgtagcaactgatgaaaacattattaaaggtatttacaggagcattggaactaaaacattctatgtattattatcctaacatgtttaaattaaaaatttaaatctggacattctaaaattatcaatttctttagtttgcttatatgactacaactactgatatttaatgaaaggccctagaaagataagaatttagagtttatagatgttttctccatttgtctctgcatttaatcagtattattattattattattattatttttaactagacacaaaggaagaaagcttaagtctttgtactcttaagctttttttttttgaaaaatattcattataacatgccttatctgtttggtaaggattttaattatcataaagtaatctactgtaagtgtatattcaaggatcatttatttttcttttatgtggatgtagttaaagtgtgggtgaagagaaggttgaaattgagatgagcctatctttccatttcagctgccaccttctactcaccagcattccatgattgtcaatacaggaaggtaataaaaaaagtaaagaaatctaacataccagaggacagaaatatgggcggtaatatatacggatagatttctgctttcatgaaggattaactgttacaggaattgtcttcctgccataaacaagtagaaaattagaatatgtatgtgtgtctgtgtatctgtacacatatatgcatatacatatgtatacatatacatgtacacacacactacccagtgtgtatatatacatatgtatacaaaggagcttgggtggtgcaagtagtttgcgattagctgctgacctaaaggttggcgatttgaatccacacagtggctccatagaagaaaggcctgctaaactgcttctgtaaagattacagccaagaaaatcctacggggaagttccactcagtaacacatggggttgacatgggttgggggccaatctgacgtcagcttacaacatatgtgaatacatacacacacacacacacacacacagagttttcaaacactggataataggaaacatagaaattgatttctgaatctagagaatcaaatgagatgagccctacacatgttccagctaactgcctggagactgctaccagactatagcacataatgaaggaatacaaacagaaagctaaaggtcctacagaattgaagagacacacacaggtataaaggggggttaaggcagctagaatttgtagggtagtgtactggaggggaagaagaatagtagaggtttccctacagtgtttggctaagtactgatctgtgcatgcattggataaaattcatgaggacagaggaagaattactatgatcaggatgagaaatttttagagctcacacaaggatgaaagtagcttatatttccaccattcaaagaggatagaccttctaataaatggcagatagggtaaagccctcagaaaagtcaagccttcatagtagtaaggctaaattataaccagaataaaggcttccctagacttgtcaaaacaaaacatgagagaaagccttggggtgagagggggagggggaaactaatctgcaactaacttaaatacatccaagaagaaacatccaacaatatttgtaagaatacaacaaaattctgtactcaataaagttcactgtctttcacatccaacaaaaatttccaggcatgcaaagaggcaggaaaatatgacccatacttcagggaaaaatgaatcaatataaatagacacagaaatgaggtaatgaaattaaaaaccaaggcctaaaatggtgcttatagatattataaatatgcacaaaaatgtaaaggaaagatttacatattaaaggaataaaaataccaaaatggaaataatacaaagaaaaaaaaaaccctagattttaaaatgaaaaatacactgtataggactaacagcagattagacttagcaaaaaaaaaaaaaaaaaattcataaatatgaagatataaccatatgtactagcaacactgaagctctgaaagaaaaaagattttaagaaaaatagagcatcagtgagcatcaatatgaagtgtaaaatataaatatgtacatttggagccccagaagaaaagaaaggggaagacaaaattacgtgaatagtgactaaaaatttatcacatttgaagaaaactataaacccaagcatttcaatgaacccccaacaagatacaatacagagaaaacaatgccaatgcacatcataaaattgctgaataccaatgataaagacaatatcctaaaagcaacagagaaaaatgattcattaaagaggaacaaagatgacactgacatcagacttcttgtcagaaacgatataatccagaagaaaatggaatgacattgttaaagtgtttaaagaaaaaaactaaaaacttgtcaacctttcaaaaattaatttcagtttattaatcattccattaattttgaaagttaaggtgaaatatgtattttgtggactaacaaaaagtgacagaattcatttccagaagataacaagatcagaaatattaaagaaagttttttagggagctgaaaaatggattgctattgttgttagatgccattgagtcaacttcgactcctggtgaccctaagtacaacaaggtgaaacactgcctggtcctatgccatcctcacaatcgttgctatggaaaaatggatactaggtagaaatttatatgtatacaaaagaatgaagagcattggaaatggtaaatacatactcgttgtcatcaagtctattccaactcatagcaaccctatacgacaagagtagaaccaccccatagggtttccaaggctgcaatctttctggaagcagactgccacatctttctcccatggagtggctggtgggttgagctgcatacacagaaaatcctaaggaatctacacaaacactactagaattgataagtgagtttagcaaggtcacatgtaataagttgatataaaaatcaactgtgttactatttattagaaacaattggaaattaaaaaaaaactatttccaatagcgtcaaatgataaatgaaatagtgacatacttgataaaatatgggaaaatcttacacactaagaagtacaaaacactgttgagagaaattaaagactatctacataaatagagatttaccatactcatggatcagaagactcaaatgttgttcagatgttaattctatgcaaattgacctatagatttaatgcaatcttaatcaaaacactggagtcctggtggcacagtggttaagaattcaattgctaaccaaaaggttaccagttcgaatctactagctgctccttggaaaccctatggtgtagctctactctgtcctattgggtcactctgagttggaatcgatttgacgggcagctgtttttttttaatcaaaacactagcaagttttttggtagacaaggacaaactgattttaaaattatttagaaatgcaaaacagttttccaaaagtaaaacaacatcagaggacttacactacctgaattctctaagtccacagtgaccaagagagtgtgatatttcaatttgaatttggatttggaaggtaaggatttggatactgaccaatgtgacagaatagccattccagaaatagactcatacatatatggtcatctgatttctgacaaaaatgacaaaataatttaagggaggaaacgcagcatgctcaacaaatggtactggaaacactgaagaaaataaatcttaccccttaccttatactatataaaaattaatacacaaacctaaacataagtgctaaaaccattaaacttccaaaagaaaacagacaaaaatacctatgtgatcttgggttaggtagcaactgcttaattagaacacaaaaaatgaaccataaaattaaagaaaatgataaattagacgtgatcaaaatttttaaaaacttgtcttcaaagacatttaataaaataggtaagtaacagactgggagaaaaccacaaaaaatacatttaataagaaatttggatccatcataaaaggaacccttataactcaataataagacaaataactcaatgtaaagttaagcaaaaaatatgaatgcacacttcatgaaaaaagataaatggatggtgaataaatacaggtaaagatgctcaacattattagtcattacccactgctgtcaagtcgattctgactcatagtgaccctataggacagagtagaactgccctgtagggcttcaaaggctgtaatctttacagaaacagactgccgcacctttctccctcggaacagctggtgggctccaaccattaaccttttggttagcagacaagcgcttaaccactgcaccactatggcctcttcattagccattatagcggtggaaattaaaaccacaatgagataccaatatctttgccaatatttaggattgccagtctttctaattttaattaagattaaaagactgacaatcctaaatattgacaaagacgtggagcaggtggactctcatacgttgatggtgggagtacaaaacggtaaaactactatgcagaacaatttagtagtttcttataaagttaaatgtcacttatcatgtgacccagcaatcacactctgctgttacccaagagaaaaggatatatatatctactctaagacttggcttatatacagatgttcataataactttatgcataataaccccaaactagaaacattagctggtgaatagataaacaaattgtggtacatccatacaacgtaatactaatcaataatttaaaaaacaccctgctgatacacccaacaacatagatgattgtgcaagcattatacttattaaaattagacaaactcaaaatactatatcctgtatgaccgactccatttacacaaaatcctagaaaaggcaaaagtacagtagtagaaagaagaccagtcattgcctgggaacagaggtgttgggagaagactggctcagaggcaggagggaatattctggagtgatgaaaacgttctacatcttgattgtggtagtgattacccaactatacaaactcactaaaatgtacacttaaaaagagtgaattttgttgtatgtaaatttaccctgatatactcaattttaaatattttatgcttactctcccaataaagacttactaaactcttaaagtgaaaccatggtaggccacggaggaacacaggatctgggctttccccagctatgtccctgaataagcacaggaggcatctgaaagtggtattggcaaggaaggggcttcaggtctcaccagggagcaagactgaagctattcctcaaccccaggttgagactattcttcaattgtatcatcctttcagtaaatcttgcaaagtagctataattattctcattttacagaggaggaaggcaaagcccagagaaatgaagatggtcactggacagagtgccagcctgactcctaagcttgcgttctctccatctatcaacatgcctcttggaagggttagggatctccattatcagaaagcatgccagtggctctgtagcctggtacttctctagcttggggtgggggaagagactcctagatttcctggctatatgcccaagatgcatctctgcagagagagtcttcaaggagcagagtcactaatttatgaccttataagcagcctatatatgctttatgcaaatgtatttaaccttcattaaacctcatatttctgcagcatagaattacctgattgctcactgctggcaagcagttcattgcattatcttattaatcccaattttacatatgaagaaactaagatttaaggaagttaatgaacttgcccatggtcatatggctacaggtaggagagccagccttcagaatggaacaacttaacataaagaaaacaaaaatcctcacaacttgaccaataagtaacatcatggtaaatggagaaaatactgaagttgcgaaggatttcattttatttggatccataatcaatgaccatggaagcagcagtcaagaaatcaaatgaaagactgcactgggcaaatctgctgcaaaagatctctttaaagtgctgaaaatcaaagatgtcactttgaggactaaggtgcacctgaccaaagccatggtattttcagttgcctcttatgcgtgtgaaagctggacaatgaataaggaagaccaaagaagaatggttgtatttgaattatggcgttgggcgaagagtactgaatacaccatggactgccagaagaacaaacaaatctgtcttggaagaagtacagcctgattactccctggaagtgagtatggtgagacttggactttggacatgttatcgaggggccagtccctagagaaggacatcatgcttagcagagtgtcaagatggactgacacagtggctgcaaaaatgagctcaagatagtaacaattgtgaggatggcgcaggatcaggcagtgttttgttctgttgtacacggagttgctgagttggaattgtcttggcggcacatattaatataagggccagcgtttggtcccaggcctatataaacagcaaaactcagaggcctgattggtgtatgattacggtataatatcctgtattcagtttactaaacactttgaatcaataaggatgctcttggtagaaagtcaaatgttaaacagtaaggaactgtattagctcacgaaccagattaaattagggcaagcttcagggtcagcttaatctaggggctctgcctgtttcccttggctctgccttgtctgtgtctcagctttatcttcatgttagtagtgagttggctgtagcaactctgtatcaggcagctgtactcccatgtctagagggagagagaagtcaactcttcaggtgactctctccatacctccaaccaccccttcctggaaaattagctaagtaaggtcacaaactcattcctggacaaatccatgtcaccatgattggcccaggcctgggttcttaagtcaatctctggcgaggagaggaccatgactgtctcagtcaggttttacttcagaaatggaaataaacatagggaagccaaccataatgtctgctacatactctcttagttattattttgattgagttttatagcaaccctgccactcggagactatttccattttacagatgagaaaacaaatccacagagaatacatatccctgaaagacacaatagccagtattcaaagccaggtcttccaaggtcaagtacaagtctttatactactttacaactaccacaaccttaccctactctcccctttagatcaaattccaagatgttgctgaaaatgtattcaccgtttatgttccctcctttggtatttatcattatttttctgtagctcaattgccactccatcagggactattgaaaaacaaacaaacggaccaacctgttgctggcaacttgattccaactcatagtgatcctataggacagagcagaactgcgccataggttttccaaggaatggctggtgaatttaaactgctgacctgttggttagcagccaaatgcttaaccactggagtcagccaccagggctccattatggactatagtgaaccatttacaaccaagttcagaggcttcttctgttctttagcatttcctttctattgaggttttgcaggtgtcatttaaaataaatacatagtcatactagggaagccagcacaacttgtccaaggcaaactcatgaaagctccacagacacatccaaactccctgagggactgaattactgggctgaggcctgtggggaccacggtgtcaggaaacatctagctcaattggcataacatattttataaagataatgttctacattctactttggtgagtagatctggggtcttaaaaccctgtgagcagccatctaagatattccactggtctcacacctttgggagcaagggataatgaagaaaattaaagacacaagggaaagatgtgtccaaaggactaatggactgcaactaccacagcctctaccagactgagttcagtacaactagatggtgtccggctaccaccacgactactttgtcagggattacgatagaggttcccaaacagagctggagaaaaatgtagtacaaaattctaactcacaaaaaaacaccagacttactggcctgacagagactggagaaaccctgagagtatggcaccctttcagctcagtaatgaagtcactcctaaggttcacccttcagccaaagattagacaggtccataaaacaaaatgagactaaaggggcacaacagcccaggggcaagggctagaaggcagaagaggacaggaaactggtaatagggaacccaaggctcagaagggagtgttgacatgttgtggggttggtaagcaatgtcacaaaacaatatgtgtactacctggtttattctgtaaaccttcatctaaagtacaattaaaaaaataaaataaatacatagtctgatgtattttaaaacctgtttggcgtggtatagattttatcctcttcctcctcagtgtcactctctaatctcctgttcagaaagcctgtcctttcaaattcttttccacatctactatcaacatgttatcaaaccataccctcaagccctttggctcttgccacctgtattcatcctccatagaagacctaatgagaaggttctggcctcagggcttttaaagcaacagtgtcacaaaggtagcacctttatttcttaacagctacattagagaaatgtcattgaaaaacaccctcaaatatctgcttaggtacatagtacagtgtttcaaccagagttccaacagaaatggaaatagtgaacagaccagcagatgactctgacttcagtaacctagcagagccccaggggctggtgtaaaggagtcccttgcactttggactctacatttgaaatgtgctacaataaaattcactccttttgactctcccaacaactgtgcactgggttagggaaggaagaaatcagtatatccagtttagatgaggaaatggagacaaagatttgctcaattagtaaggcatataattgaaactgaaacttaggtatagtggttccaggttgaatgctgtttctactgcattatgttgatttctgaaaaagttagggcagtcatatgaaagatgcaaatggccagaattagctcagtacctctaattctgcattttaagtttgaattatatatatttttggccttttcttagtgttcaggaaaagtatatgagacttgacaggaaatatgatgagaagctgcaaccattttgacccaagaccaatatacaaaaattcaaaaggtgttatcaagagtgtgttggcaccattgagagcaactgtcataacctgccttccaacagaatgttatcattgtatgttgaataagatacttaactgtactcatgcagagcctgtacatagaccaacaggcagttgttcaaacagaacaaagggatactacgtggcttaaaatcaggaaaggtatgtgtcagggttgtatcctttcaccatagttattcaagctgtatgctgagtaaatgaataatctgagaagctggactatatgaagaagaactcggcatcaggactgcaggaagacttagtaacaacctgtgatgtgcagatgatagaggcttgcttgctgaaagcatctactgatgaagatcgaagactacagccttcagtatggattatacttcaacataaagaaaataaaaatcctcatgactggaccaataagcaacatcttgataaatggagaaaatatttaagttgtcaaggatttcattttacttggatctacaaccaatggtcatggaagtaaaaaaaaaagcagccaagaaattaaacgacatattgcactgagcaaatctactgcaaaagacctctttaaagtgttgacaagcaaagatgtcactctgaaaactaaggtgtgcccgacccaagtcacggtattttcaattatctcacatgcatgcgaaaactgggcaatgaataaggaagactgaagaattgacccccttgaattatggtgttgacgaagagtataaaatacactatagacttccaggagaagtacatccagaatgctctgtggaagtgaggatggtgagattttgtctcacatactttagacatgttatcaggagggaccagtccttagagaaggacgtcatacttgataaggtagaaggtcagcaaaaaagaggaagacaagatggattgacacagtggctgcaacaatgggctcaaacatagcaacaattgtgaggatggtgcaggaatggccgtgttttgttctgtttttcatagggtagctatgagttgaaactgactcgaaggtacctgacaacaacaacatgctgaataatattaaatgtgctattgattcttcagaaaatgtgtatctcataaagacaagataaaagaggcagcaaagaagagttgcctttttccaaatgtggaagattacagtaacggaaggggccttctaacataaggaacatagggaaaaagttacagtgggagaataaccatggtgaggaggaggatatgggcaagccgagcagaattatgatgctgcggtcacattggaagtatctagagctgagcctggagactttgtgaacagagttgctggagaattagaaagggaaacaataacggacagcattgttgatggtgggattaaggaggacatcaaaagcagctaaaagaacctcaggataaaaaagatgaagtgtctctggcaagttctccaagtcacaggacacttcgggaaggccctgagcagcctgggaaagagtcaagagtagaggagaatgatgaggatgaggcagggtcactgtggatcctcaggattgctgaggaatgggacatgctggagtttccaaggtttgtgacagctagtgggattaaacgaataggggaaggagaaacttccctttgaatgacatagctcagcccatctgtttctgaagaattcaccttactttctattccatatgctcgcagaactccaccctggaagtgtagtttagtatccttttaaatacagactcactaatggaaatggtttattgtgaagcaaggcaggtgccccagggcttctgcctgctcctgttccacggccgccatcatcctgggacacttcattcagtctggtggcgttcagatgcttgatggaatctgtctggatcccagtgcaataaacaaagtggaggctggcaggcatgtgcctgtgactctaaggtgtcactttgtcatgtaggggttggtcaacaatggagatttctccctccatgtacaacgggtcgcccttctattcgttagtttcactataaccatcttatacaagttatactaataaacgaaggcctggtggggactcggaacagcacctcacacactgtggaatctcagatatgctggtttgagggaatgaaggccatttcacttgggttccatggcagctcagtcttctaccagagcggggcaacctgcggactgcacggagcgctaattgccttccctgattcttgccagtcagtgcaattatctacacggaaagcagctcccactgattttagaatgagcatctcctgcacgcctgaagtcaggagcccttagaggagctttgctctaaaacacaaattctctatgatggggatctattatcgctaatgaataaatatgaagtgtggaggcagccaggtttccaggggcctggggcccttccctctgcactggcctctcacatctctggttcccttgaggtaagggagctcatttgcagagggcacctctgtaaggcagttcaggtgttatacacatcaaaatgaattttaaattcagattcaattcaagtaaaaatatctagcttttttgctcacataaaaccagagggctaaactgcaaggcttttcataactagggttttaatagggctggctgctccactgtttcacataaacgatgacgacgtgggctctctgatatttgcatcttggcatctgatggtctcttgccacctcacattcagtttataggatgatgatgatgagtttttcagctccgttttccttgatgtggatgaagcaaactgaaatctttagtcacttggacagatgacagcagttccaactttctctagctagctgatattcttatcatcctgctaaaatctaattatatgtaattaaggagctggtatttgtggcacgtaccaattattaaagtgccaaagtaggggaaaaacattttctaattcaaagacaatttttctatctccttcacataaacacatgataccagatggcttatttaaaatgagccccatggaagacccaccccaatagctttactaggcattgctattacctatgaatgaagttattgtttgaaaactgtcttccctgttttctggcgtgtaggctccacaagttttgtggaaacagactgaaagttctaagaccacttcccagacgaggggaatgaggctcatgggaggtgaaatgactggtttagaatgactagaaaaaaaaaatctagaaaacaaatatgtctgcactttataatgtaggattgcaaccttttttgtttgtttagcatatggcaaacctttcacatgttgaacataacagatatcctggctgactaaatagggggctatgatgcagtttggaaagcaaaggatttgagagggatgttattgctaaaagagggaactttagtaggtgctcccttaaagaggtagctcacctttcaagatacttggtactggctttggataccagaagacttcttatatttgggtctaggcactgctggaccctgttggtggtccgtccaactctttggggcctgactacttgaatgtatgtgctcctgctgaacttcctactgctaggaactgtattggtctgtctgaaggtaacagccccagaagtagcccttgactactcagtgatgagagctgctgacgagcatcaggtccctcactactcgggtgagaaaaccctgcaacgttttctgtaccccagagttgccctcagattaagcttctgccactcacaatggtggccagggccagtgccacatgtgtgtgacctgcacagtcacaaagggcactgtgctctgctgtcaccatcttggaatttttaataacatttgaacaagaggctctgcatttccatcttgcactgggaactgcaaattatgtagccagtcctggtggtagatgtgctattgcttaaggtgtttactcaggtgtattagcttgcttcccttcctggtctcactccctttattggtctttcctgcacctcctgataacttaattgctcttgaatacttgtcacagggtctacttctggaagactccaaactatatacatacatatatataaaatgaattttgaattcagattccatctaagcaaaaaaaaaaaaaaaaatatatatatatgtagctttgtttgctcccataaaatcagaagggctacactgaaaatcttcattttattcctcaaaaacattctcaagaattaagtaaaaccatcctactcttttattcaaataaaacaataatgcccaggggtttaatagtcatccaagataaagtcatggttatatcatctatcattattaccacaccttactgtcatatataaagggccgattaggaagtaatacccaaataagcctcccatcttctctgcatcacagaccaagtgcccaagtgaatccaacatgcaaatatctccccgaagaagtagggcaataatcagcagtagggttgacatttcaacaacagctctgcatgccatctgttttaaataaattatttgcctttgccagcaactcaagaagaataagttcacataatttaggaactgctaaggcatgtaaatttttgactatttacaatgacaactttttttttttttttggtaatggccaataaaattgaaaaaaaaaaaaaatgggccagggaaatcaactcttttgtagagtccagtatttaggaagatataagagtgatttaatctccaactacattttagtaaagatatgtaaataaagattttggttcaaaatcagatcaggtaagctcagcaaatctgaagcccatgtattctccattttggtagccccagggtccagcacaatgtcttggatggagtaaatgagtagtaataaatattcagtaactgaactgagcttggtttacgcttgtgccttgcggtgtgaacagtaaacatgaaacagattcactcctccctgtggcgaagttgtatgttttccccactaaccctttcttactgactggacatacgacacaggcatgaccccagtgcatgaggacggcctgggaggaaggagatatacgaggacagtgggtgagcatcaggtctaggtgggatactgcacatgactggcagttgtggtctgacatcatttgcagggtgtgggggatgtaccgtgtaagaactggctggggaaacaaaagcgcaccttaggcctttctccctcgtgtgaggcttgtagccagggacttctaaaaccaaggccatccatcactatatcatcatcggtatgaatcctgtcactcctctgtgatgaactatggggatatcattttactcatcattcagaaagatatccacagacacctatagttttcatacgcctcttaataataatggagtccctgggtgatgcaaacggttaatgtgcttggctcctaactgaaagtttggaggttcaaggtcacccagaggtgcctagaaaggcctggccatctacttctgaaaactcagccactgaaaacgctatgaaacatagttctattttgacgcacatggggttgccaggagtcataatcaactcactggcaaataatttcttaataataataggtacaacaaaccatgatgaccggtgaatgattttctgctagtacctggcatggtgccaaacactcatatacaaaaactcaatttaaagatctcaaaaatacttcaaggtaagtatcactaccgtctctggtggagggaacagagggttacagaggtttggtaacttgctcaaagttgtagaacctctttgttggcaaagcagaactggagcctgggctgatggaactgcaaagcccaggttgtgaggctgttgaggaaattgacggacgcactctcagaaatgccaaacatggttgtggtattactactatggacaaagtctcagtcttgtccagaaatagctgcctcagctttgtaatttctctaatgtaatcagatctcatgattcgtactcatgaccactgccttcccacagattcatgggcgtgggaacttgacagggacagatatcttgatgttcccgtagtacccccacttgctcaagagtcacagaagtttgggtcagaaaaaatactagtgagtgtctaggactccttgatcttacagctgaggaaacttttgacgtagagagatgaagcgttttgcattaagtcataaaattccaatgtggacttcagactcctccctgccccccacccaccacccatggccacggtccactgcctccgccttaacattttttttttaatctgattcaattgcaacccagactattagaagtacctttttgtttgtttaaaattatgagctccatgagaaagagactaacttatttaaacacgtgattctaaaacagaactatacacaaatacatcagggaaacattcgacgactaggttgttggggagtggcaatggagaaggacatctttggaaatgcaactccttcattcagaagcagggcggccgatgcccactccaaatgtgttcctgtacacatgggattccttccaaatgggctctgagggcagaacacactgccgagtttcaaatgggcagaagtcacctgcaagcatatttccactccatttgggagctgacacaaccgagttaccggcagagactgtttatcacggtggcatgaaagcctcctttcaaatccttctggcttctgtaatcaaacaataacatctccagaggtaggctttagccacataagaaacatattggaaattgattcaatgctcctggctcggctgtgacaacgtctcataacctactaacctcttggcttgttcttccctcttcctgaaaagctttttagcttcaccagggtgccacagcaaagataaagcaaacatcatccttttagctgattgcatgcaatgtgagtggagcaggcactgtaccactgatgagatgattgctaaatgactcttctcacgttctatcaatgagctgaggaaagaaatgaagactgacgttgatgagttattttctccggcactaccattttcacaaaggagagcttctctttaaaagcagttaagggctggttgcatgcctatgactcattaaaagtgcccagaccagctccatgttgtaatggatttaccgggatgttttccttcctctataacccattctcttttcccctgacacatctcttgagtaagaattcatttgagtcaagagcttcctcccacccctctctctccacccctgttcccaggatctctttccctcttctttttctcagtcatgaatttcagcacatgactcagttttcatccccacaacttgtcatgactctcacttgatctatctttctagctctttacacctctcttaacctaatgtatttcctcaaacatgtcaagcctactggacacagtactgggaatcctggtggcctgagggtgtggatcaccttagttgaggctgttttcatgaagtacatctgagttcttcgagtagggacagtgtctcccaagcttggctatggggcttctgaaaagctacaacctcctctgtggcaagcctattatttattgacttccttacagcttttccgtcactaatttttattcccttcaggcataagaagagctgctggccttaacagcactcaaaccccaggcagttcagcccatctacgatacacggtcaactcagaattacctgtggtaacatggaagatgaagagtttaaggctgaaaggtcgcccacgagcctttgtttctaaactcgtcctcctagctggtgcttcagaattggctgtttgggtcccagctaatgtacctcatgagcagccaccatctgtctgtgaaagtttgactgttgctgtgatgctggacaagtttcagcggagcttcctgactaagacagactaggaagaaaggcctggtgatctacttccaaaattcagacaatgaaaactgtatgtatcacaacagtccgatctgcaaccaatcatggggatgacacaggactgggcagtgtttcgttccattgcacatgaggtcaccatgagtcaattgccaacgccatggtcccttgtggcgcaaaaggttaacatgctttgctggtaaccaaaaggttagaggttcgaatccacccagagatgcctcagaagacagacctggcaatctgctcaccaaattgatttaatgactcactaatgggtcacaactggtagctcaaaaaacacttgtttacttctattttttttaatgttactaatatagctttaatatttttgtatctttagtatttgtgtggtacttagctttctgttcttttaatttccactttcctgtgtacttgtgcttaggtttatcagctgtaaataactatacctgcttgataaactttgccttttaactagagattgtagtctatatatatcgatcgtaaatcctcacgtattctgatttatttctactatttctctattttattttatgttttctacatgtccgcttttctatgtatacttcttattttctgtgtttactttggattgactttttcctccttaccattctgtttttgccgagtgtttctactagtttggaaatttctatcctttaactagttgccctacaagtttcagcatgcatatgtaacttaccaaaatctaatatagtaatcctcttcttcactaatataaggacctgatgatgctatcataccaccccttccagcttaccttcgattatcgtctggcatttatttctattccggtatacttttatactttagtatttagtaatgtacattacttatttactttcgttgtaatacattttccaccttctttatttatcagttctccttgtaccagacaacaacctctgtgtcatttttttctgcctgatgtacactacttagaagttagtgaggatatgttggtagaaaactgtttttctaggtttggaaatgtctttatgttactgtctttcttgaagtgtggtttcactgagaattcaattccagaccgtcgattactttttttctgcacattgatgatataattccattgtcttcaccatggttgagtcttcaccatggttgaaagaagttcactgtcattctaattgtcattacttacaagtatttattattgtcgtacttataattgtcattaaaacaaaacaaaacaaacgagcccattgctatgcagtcgattcctactcatagcgtccacagctgtgtgtcagactggggctgtgctccgtagcgtgttcagtggctgattttttcagaagtagactgtccagtcctttcttctgaggtgctgctggaacctccaaccttttgattagtagtgagctctttaaccctttcaccacccagaaacttcagctttctcttaaccttatggatttaagctttcttgccattcctagcctctgaggcatcctttgcctgcagctcagccacgcatttaagaaaacatgtacatttctaaactgcatcctgtactttgcggtgtgacggtctatgaacggactttgaacctataatttgcaatattgccggaaaaggaaatccctgaagattccttttttttcaactgtgcccacagtaaaaaaaaaaaaaaaaaatcacatttcatatgaaaaatccagattttttgcacaattaaaaaaaaaaaaagaggaaaaaaaaatctagaattttggcttcccttgaaaaatggaaaggcctggccacacaaggctagttctcctatggtgacaactgaaactgagaagtagctgcctctctaggatgggccatgttctcctgtcactcatataacgtacgcgtacacaccttaaagcccagcccatctcactcactggcccaggcgtttacttaagtttgcaaccgctggccaaacaatctactaaaggaatccttggtctttgtgccctgacaagtgaccaaaaatatctagtcatcattcagaattcttggaggtttatttaactttatttcacagctacagactaatctgatcggatgctagcattaccacatctagccatgctgccaagctaggtacagaacttttcagaacatatatttcctcatctgtaaaatggtgaccttaacacccaccttgcagggttgatgtgaggattaaacaaggcaacatacatcaaacacctacgccagtacccagcatagagaaaaaagaaagccctaactaagtagtaggtattagtataacgtgtcatcgccttatcttctttcagaatctgctgttgctttggggagatttcaagttttgaagctgaggcattttgctacttgactttgttttgacctctgcttattcattactatgctgtaagtcacacgcacattctggtacctgctgctgttagctgccattgagtctaactcacggtgaccttatgtgtagcagaatgagatgttgctcaggcctgtgccatcttcatgactgttggcatatttgagttcactgttatggctaccgcatcaattcatctcattttggattttccagccttgtcttttggactaagaggtcttgggaaaatgtggaaaaggcaaaacttatttaaagtgtcccttccatcacctgtctggtgggccctttctcctcccgtacctgggttagttgacaccaccccctagggcttcatgtctgccttcggccttggcaattaaggctcccccatctgtagcacctcacgctggccttttctaaatgttgaacccttctttcttgtgctttccagtcacctggcaggaaaacgcgccagccctgtggcttattcctcagagtcttacaggtgctgacctgagaaatgtactacttctcagctgttaacaggcagtgaggcataacgtgtatgtccttctgaacaccatctgaattataacaaggaccttcacccaaagtaattaccaatggctgggaaactcagatacattctagtaggttggcagaaaaatattttgggggcaggaagccctttggaaaccttaaacattcctgggcgtccaccccttttatgtgaatacctgaccctatttaacacagcacgccctgacaaggaaacagtatgtaatggggatgaagattactagtgcgtgtagttggcccaaggctaagtgagagaaaatgaaagtgtgttttattttaaaggtctaaatgtgatggtcatagtgaaaagatggctgtttcttatcatgttggtctttttgtaaaaatctctagtctacttattgcctgtacgatgaagttcaaatatgtaagcatggccttcaaattctccacagtctggtccatcctacaaaaccaactctatctccacctaatcttcaaaatgtaccctccactctagtcgagctggtctcttgttgatgccccgcccccacaatgtgccaggctccttcctatccccagaccttgatcactctgtttcccttgacttgaaggacattcctctcacctttgctgataaaggacagtggttccttcagaacagtggttcccaaactttgctgcacattggaattacctggggatctttaaagcctagaaatgcctggctcccacctgtagacgctgtgatttattttggtgtggggtgtgaccttggcattagaatttttaaagcttcccacatgattctgatgggtatcgagtttggaaaccattggtataaatggtgttgttgttagctaccactgagttggctccaactcatggcgatcccatgtacaatggagtgaaaggctgccccatcctgtgccatcccatgattggttggggacaggaccattgtgagccatagagttttcattggctgattttctgaagtagattgtcaggcctttcttcctagttcatctcagtctggaagctctgctgatacctgtttagcatcagagcaacacacaagcctccactgagagacgtgtggtggcagcacattcagtgcagcggctggaaactgaacccaggtctctggcatgaaaggtgagaatctatcccagtctaaattttttttttctaaatagtgaatggaaaccctggtggcgtagtggttaagtgctacagctgttaaccaaaaggtcagcagtttgaatccaccaggtgctccttggaaactctatggggaagttctcctatgtcctttagggtcgctatgagtcgtagttgacttgacggtaacaggtacagtacagtacggtaaacagtaaatgctcttaaattcaatatcttactcttgtcttcttacaaactaaaaacaaccctcccagctccaccaaagctgagctgcacacccagcctctgtgccctcatgtgtacacagagcacgcctctaccttatcagtgatcgcactgtattagagttatctgttggcttcactgtctcccctactagactggagtctacagagtgcaggtatcgtgttttattcatctctgcatactcagcttctgacacagggtgtggtttgtagaagatgctaacacaggcttgttgaactaaatagaacctagagttccttggttcaatgtataggagtgaacatgttacaggagtaaaaaaagccaccctttcagccctctaaatctacaattctgcttcgctaatgaaaaaagggagccaaagactagcatttcgtgtggcaacaagcacagaaacctccacctaagctccgtctcaggactatctctggtagttagaggaaagtactcacaagaagcaagtagatagatggtaaaaacagagagccagccaggaaggaatgagtcaggcagagagcaacaggaaatgctccaagcacagggctgggtacacagtggatactcaagggatggaaaacaatattatttccagttcttgccagaagaaagtgcctgtaactagcagtaacttcagggcaggcagagttcacattccagactgcatttgtaagatacaaagctccctctttggagcttgtcacttgtagctacaaacggaaggaactcagtgcagcctacgtggaagcttctttgcccaagctactactccccaatacttcctgggtgtcattttgtatgcctggaaatgcagaatttaaatcatcctggtaagtattatggagtctgaatcatttagaaccacaccatcctattccacatctacaggcattatcatcttgttgtttttgttgttaattgccattgagtcagctccaaatcatggcgaccccgtgtataaaagaatgaaatattgcctggtcctgtgccatcttcacaatcaatacgtttgagcccaccgttgcagtcaccgtgtcaatccatctcatggaaggtttcccttgtttttgctgaccctctacttcgccaaacatgatgtccttttctagtgattggtctttcctgatgacaagtccaatgtgagcaagacaaagtcttgccatcttcactttggaagagtattcttgctgtatttcctccaaagtggacttattcttctggtagtccagggtatatcaagattcttcgccaagaccacaaatcaaatccatcaattttcctttgatcttccttattcactgtccagctgtcacaagcatatgacgtgattgaaaagaccatggcttgggtcaggcgcaccttagtcgtcaaagtggtctctttgcttttaaattatcatcggagtagttctcatttctatgtctctctgttagcagtcaacaggccggtatcttccaaagttgttattgagaacatttgtactttccccccacattttgttttgatcatctatagttttccctttctacagttaagactaaatatgtcagcacactattctaaacatgacatttgattcaaataacctttcactcaaaaagctgagaaagtttgatgaactttatgaattatgctttaattttatttttaatatgattgccattctgtctatgttaaactttttccaaattttctcagcggggaaaattagtaatgttcttgaaataagacagataattatcaaggactttaattgattggcagctgtaataccaggagtcctgctgtcctatttgttttaattttagagaaagaaaaattctagatgcattgtctgccacaggagatttattttgaacctccacgtactttgttggtgaccaatgacatgtttatttataaagatgttggtgacaaactaatctaaattcagtacattttctcagaaagttatcccagattactgcacgcatagagagcagtggtaatgcagattagccaaaacagaaactaatcataaatcactgaaattaatgacatctttgccaacaactctcctaattactctcccatgactttcctaagtgacagtgaaaatctgatcatgttcctttcccaccaacccactgagtgtgaatggataccaccttggtagggggtagacagcagactgagatacccagctacctcctaacatcccttcttcccttcttctagagctaagagaacttccactttttgctgggcatgtggccatctgcctggaataaaaactatgtgcccttttttccgttactgttaggtgttaccatctcacgtggttaaattcgggccagtgggatgttagcagaagggaagcgtccttaaacgggcaagcaggtccttcatcattccttctgccttcctgatgttggaaagtgggcataaggggtggcttttcagcagccattttgggccatgaagtgaccttgggaatggaacccataggaggtagagggactgcacaggaggaggctggccctgtgaacctgtcctgtcagccccggaccacttccctttggacttacatgtacgagcccctatactttggggtttcttccactctacctgaacctaatcctactggtactaatagtgagggaatgccaaccttggcatcaagactaaaaatatgatctagatcacttaaactgtaatccacataccgatagcagttattgatcatattctattcgggctttaatacaatagagtgggtcccacagttctttctgctcagatgagataagcacctattttctggttcttgttctctgtgtaactgaggtacttaatataagagcccctgagacctttcctttctttcctggccaaaaaaaaaaaaaagaacaacaacaacaaaaaaaaaaaaacaacagactacaccacaaacattcttggcatcaggccagacctctcttctgctttgctgaagaagctgctgcatttgttggccttcaccgagaatctggtatagcttccttgacaacaataaccatgtatcactcgactcttttgtccctttagtatttacctaactccagactgggcacattactgttgtgtattaaatgcttcatggttacaagaacaaggtctgtgtcatacagaagtaaaatgaccattgtatgtggggctccataccttcctatttaactcaacatagctttgtctgacttctcagccttcaagcaggccatttctcaagtacctaaaaataaattctcttcccttttggtagtgatacttgtgctattccttgtctgatgtacagttgagcctgtcctttcttctttaacatgaaatttgctcttaccagcactacaagtatctgaaacctatagcacccaagaaaaccaaaccattgcggtcgagtcgattcccacttatagcaatcctacaggacactgtagaaatgtgccataggattcccaaggagtggctggtggattcaaactgctgacctttcggttagcagctgagctcttaagcactataccaccagggttccatagcacccaagagttcctcttaattagaggtgaagcttgtctaactgggtccttgttacaatgcaaatacgttacctcttcaggtacctgtttaatccattactagttagtttaccagtttagctagctaacatctaggaaaggacaaagaagaaggaaatgaaagaccttcggaaaatgaaacttaactggcttatggtctgttaactaagtcagaggtacttactgagcacctactaccctcccgtataatgtattagctggtgtcagagatggctagactggaagaaggaggaaaacagaattaggaaggtgtgatttcttggaaacagtatcagttccttgggtggagagaacaccaaggcaccttcacagagccagccaaggcaagctaggtcatcagggctggatgagtactttgtctcgttgttctctggtggtgggattccttttggaatcatggggcactaaggcatttgcccattggactattgggcagatttttctttgtaattctttcaggatggcagatggttaacatgtatccttcattttgtgagagtctgccatgcatccctgttttggtagataccattcaattctgcttggctgcttctgcaaattccttaaatgatattttctccttttcccaggaatttccaaatcttatctccatttagggaattatctttgatgcttattattggctgatgtttttaatgtaagacaatgttattgggattcctgctgattactcaaccctgttagataatcagtataatccccgcccccaccccccaccaaaaaaaaaaaacaaacctattgctgtcaagtcgattccgactcatagtgaccctacaggacagaggggaactgccctagagggcttacaaggctgaaatctttacagaagcagaatgccacatccttctcctgtggagcggctagtgggctcaaacctccaaccttccagttagcagccaagtgctttaaccactgtgccaccagagcacctaatgagtataatgccaaaggaaaaaaaaagctcaatgccgttaagccgattccaacacatagcaaccctatagggcagagtagaactgcctcatagggtttccaagggatagctggtagattcaaactgtcgaccttttggttagcagctgtagcatttaaccactgtgctaccagggctccaattagtaaaatacctagggtaaatttattatagtcaaataatagggaaaaacaattagaaacatggtggttgtgatcatctctgctaacacttctcttgggacaggctaatcattttcttgctacctattagaatagaagtctcacatttattagggcagtttcaaaggaaaaaaaaatctagtgtaattattttacttaatttgcgagtcttgagtttccatagagagcaggtttagttaacaatttcctgtcttgtaatcaactcataacattttgatgaaaccaacgtgattgccctcaaccacagaaatgcaaacattcagactcacaaatttctggtctgctcttctctgtcaaagacatttactaatctttggttagaaggatgtatttaaatttgctcagctgctattatctgggaatatcctatggttataaaatacagtaagagtatgtggcaacacttagtttagataaaatgaagaaaattgagactatcagagagctaaaaaataatctcaatactcttgtggaatgaaaataaataaccacttaacttggctgagtctcgttcagtcttgtctagaatcagtcagctgaaatggatgaactgttctgagggtctgtggtgatcttgttgattggccaacccaggaaatatgccctattcccctctctctgctacttcacgcgataccaaaaaacccactcctgtcgagcagctggtgggttccaacagctgtctttccggtgagcagccgagcgcttaaccactgcaccatcagggttccttatgtcatcggatagaggctgaaaagtaacatgctttcctggctagcattggccatatgctctgtttctcactgatgccatgtaacgtggagtttatgggatattctgaaagagttcttctcttccttacgctttttgcctcaatggggtaggatgcccagagtgtcaaaaatcgttttgtaaccagatgcaacaaatgggaggataagaagccaacatggtaataatacggcagagcagacagatgatatgaaccaaggttttcatgacattattgagataccagacttctttcatggttgccttcctccaaacttttaatcattaagatgactaaactcgtggtcatcgagtcagttctgactcatagcaaccctacaggacagggtagaactgccctacagggtttccaagaagcgcctggtagattcaaactgccgaccttttggttagcagccgagctcttaaccacttagccaccagggccccattagatgattaaaagacttattacttaagtcacggttagtcagttttttcttttttgatgacttgcagccaatagcagcttactggtatagttccctaccagttttgaaaagacaagtctacatttatctaaagacaaagtcacccagaccttctgtcagcccaagactggaaacattcccaaagtcgactcttcagacagggactggactggactggactggactgtaagatagaaaatgatactggtggggagtgagctccttggatcaagtagacacatgagactatgtgggctgctcctgtctggaagtgagatgagaaggcagagggggacagaagctggctgaatggacacggaaatacagggtggagagagggagtgtgctgtctcattaggaggagagcaactaggagtacatagcaaggtgtacataaatttttatatgagagactgacttgatttgtaaactttcacttaaagcacaataaaaattaaaaaaaaaagacaaagtcagccctctgttaggaaaaaaaaaaaaaaaaaaaccatggtccaaatttattcccattagagtgatctaaaaggagccctggtgcgacagtggtgaggcgttcagctactaactgaaaggtcggtggtttgaagccaccagcggccccctgggagaaaagacctggtgacctactcccataaagatgacagcctaggaaaccctctgggaacagttctactctgtcacacggggtctctctgagttggaatcgacttgatggcacatagcagcaacagagtaatctaaagaagcactgtccaacagaccttcctgtgatggcagaaatgttcacacagaacatacaggatatggagccactgagaacttgaagtgtggccggtgtgactgaggaactgaatttttaattttatttaatttcattttattaaatttcaatttaaatagccacatgtgactaatggctaccgtactggatggtagggatctaaagaattgctagtctacttagaaatacttagattactctacatttctttgaaaacattcagcctctagctttatagatgttattttacaggccccaaaacacctcagtatggaaaaatgataagtcagcagggctttacaaagcatcatgtttgaagtctcttaaacaatattttgtttgtgcattagcttaactacacaggaactgatactgacttaagcattttacattgacaactataataaaggacatcttttttggaataataatcttattcagactatactaattcagctgttcattaaaacttttgtattcccaattacaaatgaaaagaacaatagtggtgtaccagtttcattaagctgtgtgataaaaccattctctgagataaactgtaaattatagcttgcagactgttgggtacactggaaaatccgcagcaaatgtatcaacttgatgctaagagcagtgggatgctgaacagtggcaactagagatactctagtgaaaagacaggatcagtggataccgattatgccaggaaccagcaatttgggagggctgtcatgtcctggaacatggtactcaatactatctactacacccaaatgtgatttggagaaatgattccatcatgccttggtttcgagtgtggagctaaataatcagcatgctcacattcacagctatttttagagcctggagaacaaataactctgcaagtgcccaggtggaaccagagctgttaaagttatcagctcttctatctcctgacaaggatcacagtcacagacaggtcctccatcacccgttacctcctggttgctggaaacacaagagcaaagtccatttgtgttgggaatttgaattccttcagtctggggttatacacaattttaagacacagctgatgaactaaacttatttcagagacaggactatctatgatcagggttctaaaagaatcatttccacaaggtcgcaatgagtcagaattgactcgacggcactgggtttgtttgttttaacagaatcatgagaaacacgagctaaagattacagcaatctatattcacttaatctatttggttctatgtttaaaacaaactcaactgaaaaaaaatatttaagggttttaaaccaaaaaagcccagtgccgtcgattcgattccgactcctagcgaccctataggacagagtagaactgccccatagagtttccaaggagcgcctggttatcaccccacatttctaaccaataagtgtttacaacagacacttctagagacagttatggaaatcagattgattcaaagttggtatttagagagaaattatttatcctcagtgtcacttttattttatattgacaagttttcacttctcatcagtttgcatttcattcctttgcattttggtagtacctgaaaaacatgtatgttttcttcaaactgctttcactcacttattttatagcagctttccatgtagaagaagagataggtaataatcacgtgtgaatggttaagactcagtcatacggcctggtttccaggaacacaccatggctgaaagaaggtggcatgtggaaaatgtctcgtctcacatttgaagaggtatcaaggacatgcatttttacctaggatgtggctctgaaatgtggaatcggcaattgtatcttcttcatcttcttgcaggttttcacttgcttcttttatctgcagcaacaagaaaccatcaaaagttcttatttattatattaaatagatcttttgcaatcctgagagtaatggtgtattctataacaaatgtgtgtgtacgtgtgtgtgtgtgtgtgtctgtgtattttcattctacttcccccagtctatcacttggctttattacaagttttaattataagagcagactttcagaaatataaccccagctccaaaagtgagggtttacagggtaccttgttctgcccaagattttagagataatggttttggttttaaatacctagtaaagtcagtaacacagggctgttatgaaaaattaaagtctagggaggtataattcctctagagtcagtggcttccaccacaagttattttaataagaataaagaaatatacttagatctcctgaccctttcttggactggaatgtaactctctaagaaaatgagtctttctcgttgtttccaaaatgaaacatgaagtgactgtaatatgcgctcggtgaactacagcactgaggcatttatctagatttttcaggtcaaaagcattttctttatatttcatctcaaatatccaagtgtttgagggtgtaacatcaaatgacattctagggaaaatctaatgaaatcgcagagtattttacaggtgagaattctgaggttcagcaagtttcctcaaagcgaatacatgcatggtaccagtgacactggcactaaagcccaggtcccctatttctccatccagcagcagtagtgggtacaacatcaataccaccagtgacaataaaaccagccaacacttaaatacaagtggcaggcgctgtttaaggtcattacacgaacgatctcaacatcctcacagcaaccctatgaggcaggtgccactgttatctccatcttagtgatgaagaccctgaagaagcacagaagacaaataattgtccaagtggtagagccaggatacaaacacaggatgtctgccttcagatttgtgttcattcaggggaactctgttattctcaaatatccattctgcgatgcctttgtagacttggctccgatatcaagacagctgtggtccttgtcagaatgaccctgaatagccgttttaaaatgcattccagctagtcacctggggagccaatgctaatcatgggaactgtgtaacgcaatgggagttccgtgtaggcacatacaattagagggtgttggtggatttgcccaggtgcttgggttgaatgccaagaaaccattattttacacttgtgcagtagaaagccatacagttgcatgctgaccttgagctagatttagctttctattcttggcctcttattttttatatttaatgcaataagaccaattacttacattttatgactgaggttccaatactggagtgtaactggtgcttaaattttatcatgctgatagccagaagatggcaaacttttgagagcatgcaactggctaccctagccctcacaaggacagattgttaagggctgactatctggaggtcaggcttcatcattttcttccctcattggctgcctctttgtgggcatttccctgcttaataattaacattacctccacaagaagaaagttagggaatggaggaagaagtcgtcataactaactctgtgactggtagtacacacattttatggatggtggagaggaaaaggactaggagcatgagcaaagctaaggggctccttctttgccttcagggttcacctaattcagtgatctatttgaggccaggtgaccaaaagaaacactgaagaagggatagggatatatcttccaaatactttaatttccattaataacccattgggaaattgctatccttatttatagaagctccaaagaaatctattactattttcagcctatgccagttcttatggcaatatgttctatatttttttcccacttgttatgcaaaataccatttcctttgggttgttctaaatttacccattttaaacttgaagaggtgccctgctgagctgctgggatgtgggtggatcatcatctccgtcagtttgtgaaattctatagaatcaaataattagaacaatattcttatcttacagatacagaaaaagaggctcagagtgggttagtgatctgctcaaggtcacacaggatctccactctagagtgggcacttctgacccctattccttgttataattctatttgtcagggtgtcctatattgctacagctcttttccagcccttccccagaactattatatttttcttagtgtctggcagtcatatttatagacaattttccaagtatacataggctttatttttatttaagaacagcaaaattctgtttttattttttaaacagcatgcttccttctgtacttgttcttcaaccctcctatgaaatttcatcacctttttccaataatatttaagaaagaaaacaaaagccattgttcagtcagcatcagctccttgtgtaacactttccagggctattatgtacttaacagcaaatactaaacgtggcttctgatcagaggaacagggttccttgtagacaagacccctagttcttccagctctcctgggctagcagaggcagatgatctaagaggcagagatttgggatttgaagggaatgtgtgaaacggatacaaagggatggaaaatggggcatgtcttagaatgacataactactggctctaattatccacatagatagattcccatgcaaagtggtgagtaattaaaaaaaaaatccatttgcctatggaaatgagggacataatttattttggcagcagattccccttgctaattatatttttcataaacttaaatgaaaattaattttcattcttgaccacacagtggctgggtgttggtgggaggttgcaggaaccttcttgggtggtatggactgccagctcaagactaacaatttgccaaagatagacacacgtgggacaatctacatatggcaaagctctgcaaagaatgggagtgatcacaaagccaaggaaaagtttggttagagtttggctcagaagagtctggcggttagaaattgataattttcttggccgtcactctaccaggaacagacaccagtcactgtcagtcatgtcatatgtagtaagaagtagcaggtaataacaagcaatcactatgggggttgttctgggtttacatctgttgtcagcactttgggtgccctccaatggtgcacctttaactactgtccatcttttggaactctgcagctgtagtcaagagctgcatcagatacctgcctatatcaggtagccattagatgtcactgcacccactgtattctagtaacccctatcactagaaagggcagggaggaatgtgctgacagaggacacaggcagaaagagggagaaaataattcactactgatctatacatacacataatctgagaattaaacccaatgtttggaggcatcctttatttggaattctgtacctcttttttctttgaattaccctaacactaagggctgcccagaagaacaatgttttgatgtcaaagttcatttaagaggcaaggaagaaaatgaacctaagggagacaggaagtgatccttggaaggaaaaattctggaaggcattactttctaagtcatttagaaatctttgcaacagcggggcaaaatatacatgcttcttattagcatcaaaatggcatttagaatagtactgttcaattaaggaagttgaaattacaacattttgcagaacttaataagacgataacaatttatgtaattattgcactattttatgctatcatcaccactgcaccattttaatgggatagtatttgatgttttttaattagcacatgtgatcttttttttttttagactatgtaacactgggtgaagagagtacctataatttaaattaaaatgcctgtattaaaatggccacctcctttcagtgcataatgacagtatacggtctcgttcattctgttaacgattttattttatccagggatacccaagagcagcctggagctgtcttcttttgagacttctcattttggaaaattctctcaattcataggaaggaaaagtttacaacgtgtagcaggcagagcgcagtcttttctgacttatttacttaatactggtgtaatcctcctagggaatgccttttccccctctgataatgattttatataatttaaataaaagtacaaagtaacatagcccttgtctaaattacacaaaaattagagctaagtgatctgtaaatgatggcataaatggggacataagcctctaattaagcctccaagaagataaaaaatatttttaattcagtaaagcattaattggacttttatacatattttagaatgtatatataaactgaaaaacaaacctgctgccgtctagctgactctgactcatagtgaccctacaagacagagcagaactgcctcgtagggtttccaaggagcgcctggtagattcgaactgctaacctttcggctagctgccatagctcttaaccactgtgtcaccagggtttcctagaatgtatacagcaatgctgaaatggatatatggttactagtgaactaaaaaaaaaaaaatttttttttgtagtgaactaagtggaggtttgctacccacaaggatttgttatgtgtatggaaataatctgtgattatcaccatagattaaaataattaaaatgccttagaacccccatagctatatatagtcttagtttttaaagggcaagggacaatggtaaggtctttgagcagtgattttattcaggaaaaggtgtggtatgcaatgcatcatacatggcgattattttcatccataataactgctatgagaacacttctttaaaacatactttccccacatgagactacgtgggcagctcctgtctggaggggagatgaaaaggtagagagggtcagaggctgtctgaatgggcatgaaaacagagggtgcagagaaggagtgtgctgtctcattagggggagagcaactaggagtacatagcaaggtgtataaaaatttctgtatgagagactgacttgatttgtaaactttcacttaaagcacacacacatacacacacacaaaaaaaactttcccctaagcagataacagatttaccttgagccctggtgagggaaaagccccttcaactctgaatttaaaaaggttcgtgggtatccgcaacaacgtgtcatagcattagaatgtatcttagtctgcatctaccctgcttcctgtagaggctgatagcgaatcataaatgggtcttccttgctattcttgtactagttccacagagactattgcaatgtcctttctgaaatgagtcatttcagcctaatccacactgatgattatggagatgaaacaaacaaattgcattttacacttaaagacatgaccagccagtcaactatcctggttaataatattcctctgtaaggaaaagcttcccagcatgactaatttcctcttgcagctaactagaaaaattagcatatccctattgcttatggatactttgagttggttagggaatctttgtgcttcatagaaaagaatgtttctttctgatattctggaaggactcaacaatctttattattataccatgaaaggctgcagagaaaaaaaaaaaatttttttttttttttttgcagagaagagagagggaaaacatggcgaagtaggaatgaaattgtaaaagccaaacacagggtctttttgtttttttgagacttctgtacggtaaagatataccctaagctgtcagaaccatactggatgggacacagttaaactgagtgcctctgataaggggctctgccaggctatccaagtctgagatcagctggattgaattttcagcatattgctcatttccacaagtctctgctctctctttccttttggtgacactacaagggcagtcttagatatgcttataatctgtggttttataatgcaggggatatccacattttcacagaaagagtgacaccaaggaagcctagagcaaaaacaggtggtggttgggggagagggagcagactaaaaataaacaacaacaaaatacttttgcaaagaacatagtctgtatatgatttggggaagtttgaaaaatgatcttgtggctctttggagtcaagacctatttgaataaaaaaaatttacatgtgcatttatcttacattaaagtatgtccatgaaactacagcaaacaaccctttgctgtcaagtcaattccgactcatagcgaccctataggtcagagtagagctgcaccaaccatagagttttgaaagagtgcctggtggatgtgaactgccaactttctggttagcagatgtagcccgctgtagctcttaaccactacgccacctgggctcccatgaaactctaaggaaccctaaacatcggtaactaattttaactaataatgaataactagtaactatttatgacaatcaggattacttataaattccctctactcccggatcactccagaaaaaaagtataattatttcatatttcaagttttccccccaaaatggtagcatgtactataatttataatctcttttattagagtgcaaaaagagatggatacagtaattctgtaaagagagtttttttttttttttttggcttaagtacttgaaaactcactaaaaggaaaaatgaacgtctccaaatcaattatgcaagtataaaaataatgtaagaagactaagtgcaattgaaggtaattttaaaacaaaaatattagttgaaactagcacaccctggggaaatgtaaaaatgtcttacccccaacaccccccacctttttaaagcaaatcagctgagttgtagcccttataattaaagggctaaatgacagggaaccaagtccccaaaagactttttagtcttaacaccttgtctagcctaagctgaattggtacagacgactttgatgaaaaatgtttaagtcaaagcatcaaaatagccaatattcccttaagtggtttcacaatcccatttttataatcctgttcattcatttttttgttgttggtaatgttggaaataatctttagatttccatccagcacaagggtataattttaagatgacaccggtggcatcctttgcctacactgcactgtgaataccgtcgttctgaaaatagagctgaaaagcagcactacaggtgagagccatgacattcccaatttggctgccatttccctaccgtgtttctcaccaggcacaacgctctcttttctctttttctttgacattttttttccccccacatcttctcttacccataagtttccatcatcaaagggcagaaagaatccaaccagcccatctcagaacacagcaattaaaaccaggatgctaaccaaaaaagtcagcagcttgaatccatcagccactccttggaaaccccatggggcagttctactctgtcgtataaggtcgctatgagctggaattgactcagtggcaacaggtttgttttttaagacttaccagggagtctttcggtatttccgcattggctttggttttgatgtttttcttgtggtttccttgagcgctgatagagcagccaggaagaggggagcccagggaactgccctttaccacgctcctggaggaaacattatttggtccactttttgtctgttgagctgctttcttatcaactctgcaggtagaaagcgattcctctgataaattacattgctttccttgaatcactctatttttctcaattcttattgtttactgtaagctccatgtatctctttgtctttagacctttgagtgacaagtgtttctcactggccttgatcagatcttcacctggtagttcagctagtgtatcaatttagattccgtaatctaataatttatttttatgatggtgagggggcaaaataaatgctactgaagactgattgctaaatacatttctggcttaagatcatcaggaaatgtaattacctctgggaagcttctaagtatacgtttgcttggtaccatcaataagaccgccatactttcaaacgtaagtgtaattttcttccatttcatgccacgtggatacattcatggttcctcatataggttgaatttctattactcttgataaaactttccgttctttaatttcaaagaccattggtttggttaacaaagtaacatggactaaattatcattttattgctaatttttatttcactgcttaaattctggttaacgtacaaaagaccgctattatgcatttctgcttgtgtgaaaaacatgcctgcctagcatttaatgtgcaggaagcaaacaattctacttaatgggggcaggggtcccctattcattaacaacctcttttccaatgagttacctgttcaaaagttccgtcataaaagtatcttttgtagaacacgtaacagggctggttttatttcttggttcaaacttcatttgattgtaaatgtcttgtggtgttttcaaattatgctggctttgtaaattactgtctggactatgtgctgactctgtttcggtgttgagctcattttccaaatcactctgtagttcgggcttctttttctcctttcttctctctgatattagctgtttgtttccaaaccccaaactttttgcatctttcttttccactttagttttggagacatccattttcctgctactgagagctggaagcctactccttcgaaaaccaaaccagctggcaaaagatggcccaggcttctgcttggtttccacagaggtggactttgtttgtacttggcccttttccacattctcttgaatgcacaacatgaccttttcttcaatggtgggtgagaggggggcttctgggctcacagcatcaggcctggttatagaggcatctggatgccttccagaagtttctagagggggcgtcctacttttatactgcatcctccccgggctctgcaggagtcgtgggcagtctgttggggtggacaggcacctgcaggggttgctgcctggctcctcaggcacagccacactggggcaccctccctgggcataggcctgctggtcttctgttccaggcggtgtgaggagcccttcgggttctggagggatccgcaagggcatcttatttgggctgccatgctggctgccagagctgcctgtgctacccagagagccttgcctggagggaggcctgagggggctcccagcattcagaaaattttcaggggctggagcaaaaggaggcttactgggcaagccttctgtgaaggagttctgccgggtgagagaactgcctctctcagcagtgttggtgatgatctgagttcggactttgctgggaggagtggaaggcttgtctcccgagtgggtgctgaaactctggctccgggctttggctccgttcatgcctagagctggttttaggtgtggcttgctggaggaaagggatcttttcacaggtctgttttccatcccatcttttccgccagccccaggggtgcagttttcaagtgactctggcagtgctgtttctaagggaagcccttcagctaaactgttttttggttgtaaacccagagcagtcatatgtttttcatcttctgtggtctcgatgcttgttggattcctatcgtcttgcctagacttagctgcagccacacaacttttagaggcttcatttagactatctttttcatgtttccctggcactgttgaacttttcctgagcaactggggagactttaggagagctttgagtcccagtgggagacgagttttcagtcctttatcatgagcgtttggacaactgtgtatggcactatggcttttgtaggatgacgatgatgaaggactgttaacctgagaggaaggcgactcatttacacataaaaaggaagatgtaggtgtcgtggggacactgccactaaactgtccttttcttcctggagattcactttcagagggcaatgattccagtgcctcatgggttaaggggcaattcttgggagtccgtaaccctgtgtccatttgtgtggtcccaagtatttggtgaagagaagttttggggatacctctctttggagagagctttagaggccctggagccatcactgcaagggagctggaggggggacgaccagggtgtctggtttgaatcactgtttctgtggaaggcagagggctcacgaagacaggttttgtgaaggctgcagaaggtttcttcccctgaacttctgtcatggcctgattagaagaaataacaggagtagaagagcctttcagaggaggggatttgaatactgtcttagctgtgtcactgtgggccctggttttgggcttggtggctgaaagtggtggtgaatagtcataactgtgtctgatcagcagtgacaatgacctgcctggaaggggtggaggtgacttcacccctgcttctggccctgagtcacagtgttcatcccttgtgggaggttctccgttgtcactaggctcagtgaggggccttgagagcaaccgtgaccctggaacctgactcttggagcactgggcccaatcccttctgctgggcatttttgagctgtgaggaagttgggcgaggtgttttggaatgtgtgaatctggccgtaaatcaaagaggtgagctgggctctcagatttcctgaaccgtgggagtttcccaggagctaaggctggtgatttttcaagagtctccgggtcagctgaggggactactttggaggcttcaggatccattatttttgatttcggagatgaatatttctccctggcagatagttttaccaagctttgtttttgacagatacccgtggacaccaaagacctagaattattctggcatgatgtattgtgtgttggcttggccagcttttgtcgctgaatattattttgtgttactgtcctagggctgaaagattctgtgggtgtcgagggaatattacctacattatcttttggaatgtttctctcagtttcctcttcagatctgtttaagaaagagcagtctcttgtgtcagctcctggctgcaagtgagcaattccctgaggtaaagattcagtgtgttcggccacgggtccagtagaggcctggttgacagaaatttcatttccagtcacagtgacaactccagcctgatgagagccgaactcaatgggctcaccatcttctgcatcaaatattacggtcatacattcttctgaagaagtcctttttacaattctttcctgcttaacgaaactaaatgtctttggcctattctctgagaccttctcatcaggagacccaaggtgagattttccaagtccaaggaggaggtccaggttctccatggacttgtcggtatcagcaatcagtgacaagtctgaagggcttttctcatcactgctttcaatgtgcaactcatcaagggcctcattgtcatcggtgtctgagagctggaggctgagagctaggcagccctggctgtgctgatctcttgccctctgtaatggaggcacctggacccttgggtacagcgtcccctccaagggccagttgctgacacaactgctcagcttctcagcactttccctgggataaactactgaggcagtaccttccaaaaagtgttttccattcagctcccagccaaacagactgtcaggaacactctgagtgaatttactaccatgcagcctgcagccctgttttggaagcccttggagcaacgccagggaggaagactcttcatcgacatcatcatgggaatctgtatcataaacaaatgccttgtgacgctccttgcagggactccccatggctgctggcttgtagggggggcactccttgaggctgttacacttaattcctggagaatatatcccttcatttgagttcatgcaatctttgtaaccccatttggttatcactgaagggggttcaagtaacacttttcgcttctgtagcttctttagtccttccaaaatgtggctttccttgatacgagttggaggtagttcatctgttggactagcaaagccacttgggagcgacgaaccaacacttagccttttatcccagttttgtgatgactgctaggaaaaaaaaaaaaaaaaggtagatatcagaaaagactgaaccatgtggatcacaaatatataaaagggaaagtatataactagacttaatttattctagtggttgatatgtattcacatacagatgcatatattagctaattaatgaattcataaatgatgcagtgaacatttactttgccagaccctgtgctacttaggaaaggaacatgaaaaaggtttgttttttttttttaatttttcaaaaaacctatctagtccttgaaaaatggataggtataaactttaggttaaaattggaagaagtgatttccaggtagaagaaatggaataggaagagctaggaaggtatgttcaaggcatacttagagaacatccagaaaatcaatttggcctcactgtagagtccatatgggaggcagagagaatagagctgggagtgtgagctggtcattccattctttatggtcctttctaatgtttgacagttctgttccctgacttcatgactttatttggtagacaatggatatctatgagaattatctggttactatgtatacgtgtgtagatacacatacacacacacgcacacatcatacagccctccttacatatgtaaagtagctgggcatttgttgttagaattgtatattattaacctcctaactgagaaaggtattttttcttcttcttcatacttccccaaaggccagccttaatttctaaaaagtgtacattatgaattaattagttaaaaggaaaaatgcattctatacagagatttcatatttttcctcacttgtgttagcaaagaaacaaaagggccaagaaggaaactaacatttacagagcatctactgtgtacaagccacttttagagtgaattcattttcagaacaacaccgtgagagaaacatcatgaccagtttgctcaggggaaactgaggttcagagagattagtctgttgaagatcaagagctggagtgcggatttcagctccagcttccctggctcttcctaggacactttgttgcttctgagtcagttcaaaagtggccttgcagagatttgaaaccaggccatctggctctagagcctgcactcttactcaggatgctaagctaccagagtcaggcttagtctcacttctcccttctctactaatcagtttggaacagagatcacaggttatccctgcaccccggtcctgaatggcacttggataattatttaataacaaaccagcacttaaggaaattagtgggctgtaggcgctgacctagttactttttcaaaaggccatatggttaacgtgaagggtttcagtgaaccaatctgatggtttctgatgtgcggcccttaccaaccttggctaagagtaaagctcacactggcatttccacactagcacacgctcccctcccccaggactctgcacactagtcacatgtttatattcagagcaccaagtgctgaagctgaaaacgtgtaagaagcttcctttggaatctgggcttttttagtaaactgtgaacatttgcttacatctaagacgttttcatcaaagttacgcttgttatcaacaacatgcatgtttatttttttagtcaaatactattttttctttagaaaattccccagagtcagaagatagtggggttagacgctctctggcaatgcgtcccctcttctcctcctcttcccagcaccactgaaaactccttcacagcaggaaggaatcccattagtgagcccgggtattatagaccaaccagtgagcgggtggcctcggcttgggattttaagaacttccatgatcctgacagtcaggttcacaataaaggagagaagccaggcaaaagtatcctgcacaagctcggaaaaggcagatttgttcaacccataggagaggccctcggcccctgccacccacctccttgctgcccctccaaggtctgcccacgctgtggcttgattcatccccaagtcagcagctgataccccctcagagccccggctcacagtccagtgagatgagctgcatttctcagtccgttttcctcaggaggtcatggtatttaacaacttgacaaaagctgggcccatcttaaaacttaaaaagaaaaacaaacaaaaagtatggagcccctgtgaaagagatggtggggaggagctagtgtttcttaaaggcagcttcatcctctgctggaagagtggcttgaggggaagtgcagttgattaaaagatgctactgaccagggagggcctggggttcaatgcccaccatgaagacaccaaaccagttgcagctgagttgattccaactcaaggtgacccctcctgtaccagtggagaactgtgctccatagggttttcagtggctaacgttttaaaagcagattgccaggcctttcttctgggccacctctgcatggattccaaccaccaacctttcaattagtagctgagttcttatccatttgtgccacccagtaaaccaaaatccattgccatcaagtcgattctgactcatagcaaccctgtaggacagagtagagctgccccatagagtttccaaggaatagctggaggatatgaactgccaaccttttggtttagcagctgtagctcttaattatggctccaccactcctttaaagcacatagtccttctatatttcttgtctggacaatagttttgcaatttttttttttttaaagaaatgtgattcttggtattaatggggacaaagggcaaattgattccaacatttgagacaaatcctccaagctttaggctcacttgggaagcccagaagagcagaatggttgaggaagggtctgaaacccagtgcccagctctgccatgtactggctatgacatcctggcccagttacttctcagtgctcagtcctcacctgtaagatgggggattaggataacctacttaacaaggctgtcgtgagcattaaatgagtgaatgcttgctatgtgcttaaagctgtttttcatatggtaatgactcattaactagagccaggttcttcactgtaggcaggtcagtgcttttcatgcagccttctttcctgttcctacacaagatgatattaaaaagtacttgtgtactaaaagagagccattagtcatatatttattattatataagttaatagtgtattcgtattcaaaatcgctacgtatgaattcaggatggaaggtaataccaacaagtatatggcacacggtaagaactgtagaaatgttccttggatgacataaactaaaaatgtcttctgggggctggattcacacaggtggttggacacagtctagtttgctaggcccctgagatccaggtcttttcatggtgtgatgcaccagttgtacgtggcactccatcaccattctgagagacagccctattaattctccacatgatgatacctgagtgtggacgaagtgtcttaagaacctttttcctcctccttcaggggagaagttcccttagaatattaggaattgctccaattggaagaactttagccagagagagagagaagtgtgagagtgaaaagagcagagcaaggggctctgggagccagggacagtaacagacaaaaaaaggaaacatcgctgatcaactccccaggtgggaggcaggccctcacagtcattattcagcactccggacagctcctcggagggagaaattgtgataatacacaagtctccccacatcacattagaagtctgagtccaagggaataagctctaaactcaaacttgaaatccttttctgagttctttttcagggtatatcaaagccactccctcactaatattttctaggagttatgagatttttctggtttccctgcttctgaaatctttaaattatacaaatgatagacaaatgatctccaaatattgtgattcgaagtttccatttttgcatactctgcttttcaccaatgttaggaaattactaaaatggtgtgcaaagatgtttgttcaaagaatggggggggggatcttcagctgggtaagccaactttgcagatgggaatcaactagcagtaggagctatttaaaaagctggtaaaggaacacctagaacattggtggggttgtgcccacctttatgaagctgtgactcctgtcttctaccatggtacgtcctctctctactgtgttgtcctccagtttacaggtagtgttttatgacgttacagtactgagtagaggaggtcagtacaacacatgccatttttgagcagtaaattcctacaaaacaaatgatactcccaaaacttttagggctttttcctgggataacccattgtccttcttattccctagaacaaaacattcctttaagttgtcatggtgtttttggtctcgaatggcttggcaagtggccatgttcaccatttatagcaggtgtgttaacaagtctatcacagcaatggacaaggtccgcaaaactaattagaaaggtctgagtggtctgaagcatggtcagttccattaggccagggctccgtgttccagtttgataaaaacctgtgacctcagtggcctccaacaaagcacagaatggcaatgttcttctcccaaactccctcccaagatgacagggttgttttgggtccaatcatcattctacttcttacttgctgtgtaacctctggcaagtaatagcctttgtgaatccatttcctcttctgtgtagtaggcagaatgatacctccctataaggtttttgtgaggaataaatgagttggttcctttttactcctccctccatgaccacaccctactagaagaggatgcctttctggttcacagaagtgctgaagtgccttgagaggcagccttacccttttcctgggggtcttcccatcatgccatgtgtaggaggagctgctggagtactcgctgcaggtgcttgacagagacagctcactgctgctgcagctgtttcgaggacagagatgactagggacagcaacccccaagccagggcatttcaaggcagaggttcctgattttgcattcagctggtgttcctgaaaaagtaggacagctgaggaaatgccttgcttaaaaaaaaaaaaaaataggagtgagtaaataccaactcaacttcacactaagggggaagggaacatagcataatgattagaagcacagactttggggtctgacagattataggttcaaatcttggctttgccttttactttgtggctatgaagaaatcatttaatcccttagagccacattttcttttccaacgggatgaatgataataccacctaccttatagggttattttaaggacaaaatgaggtcctagaagtacacagcacagtgtctggcctacattaagtgctcagtgatcacaagctactattattatctgaaagactggaggtttgagtctatccagaggtaccttggaagaaagtcctggtgatccgcttctgaaaaaatctgccattgaaaactccgtggtgcaccgttctattctaacatacgtggggtcaccatgagttggggtccacttgacagcaactgttttgtttttcttattgttattattaaaaaaaaaaaaacagtgtccatcaagttgactccaactcatggtattttttttcccttatcattattattcccccatgtgtctgtcagtctgtcatattgtggggccttgcgtgttgctgtgatactggaagttatgccactgatatccagataccaacagggtcacctgagcttccagactaagacagactaggaagaaggatccagaacactgtctgatatagtgctggaagatgaaccccccaagttggaaggcactcaaaagatgactggggaagagctgcctcctcaaagtagagccaaccttaatgacatgagtggagtcaagctttcgggaccttcatttgctgatgtggcatgactcaaatgggaagaaacagctgcaaacatccattaataactggaacgtggaacgtacgaagtatgaacctaggaaaactggacatttgtcaaaaaatgaaatggaatgcatgaccattgatatcctaggcattagtgagctgaaatggaatggtactggctattttgaatcagacaaccatctggtctactaagccgggaatgacaacttgaagaggaatggcattgcattcattgcaccatcaaaaagaacatttcaagatctatcctgaagtataacgctgtcagtgataggataataatcatacacctacaaggaagaccagttaatacgactattattcgaatttacacatcaaccactaagtccgtaggtgaagaaactgaagattgttaccagcttctgtagtctgaaattgactgaacatacaatcagtatgcattgataattcctgatgactggaatgtgaaagttggaaacaaagaaggattggtagttggaaaatatggctttggtgacagaaacgatcctggaaatagtgtgatagaattttggaagaccaatgacttcctcattgcaaatatcttttttaccaacataaacggcgactatacacatggatctcgccagatggaatacacaggaatcaaatcaactacttctgtggaaagagacaacagaaaagctcagtatcatcagtcagaacagggccaagggtcaactgcggaacagaccatcaactgctcatatgcaagttcaagttcaaatgaagaaaattagaacaagtccacaagagccaaagtatgactttgagcatatcccacctgaatttacaaaccatctcgagaatagatgtgacagttgaacaatgaccaaagaccaggcaagttgtggaatgacatcaaggacatcatccatgaagaaaccaagaggtcactaaaaagacaagaaagaaagaaaagacaaaaatggatgtcagaagagactctgaaacttgctctttaatgtcaagtagctaaagcaaaaggaagaaataacgaagtaaaagaactaaacagaagatttcaaagggcggcttgagaagacaaagtaaagtattataatgacatgtgcaaagagctggagatagaaaaccaaacaggaagaacatgcttagcatttctcaagctaaaagaactgaagaaaaaattcaagcctcaagttgcaatagtgaaggattccatggggaaaatattaaacgatgcaggaagcatcgaaagatggaaagaaaacacagagtcattatactaaaaagaattggtcaatgctcaccatttcaagaggtggcatatgatcaggaaccgatggtgctgaaggaagaagtccaagctgctctgaagacattggcaaaaaacaagtccccaggaattgatggaatatcacttgagacgtttcaacaaacggatgcagtgctggaagtgctcacctgtctatgcttggagatttgtaagacagctacctggtcaactgactggaagagatccatatttatgcctattcccaagaaaggtgatccaaccgaatgtggaaattatcgaacaatatcattaataccacatgcaagtaaaattttgctgaagtatatcgacagggaactgccacaaatcaggctggattcagaagaggatgtggaaccagggatatcattgctgatgtcagatggatcctggctgaaagagaataccagaaggacctgtgttttattgactatgcaaaggcattcgactgtgtagatcgtaacgaactatggataacgttgcgaagaatgggaattccagaacacttaattgtgctcatgaggaacccttacatagatcaagaggcagttgttcggacagagcaaggagacattgcatgttttaaagtcaggaaaggtgtgtgtcagggttgtatcctttcaccatacctatttgatctgtatgctgagcaaataatccaagaagctggactatatgaagaacggggtatcaggattggagaaagactcattaacaacctgcaatatgcagatgcatgaccttgcttgctgaaagtgaagaggactcgaaacactgactgatgaagatcaaagaccacagccttcagtatggattacgcctcaacataaaaaaaaaacaaaaatcctcacaactggaccaataagcaacaccatgataaacagagaaaagactgaagttatcaaggatttcattttacttggatccacaatcaacagccatggaagcagcagtcaagaaatcaaaagactcattgcgccaggcaaatctgctttgaaagacgtcttttaaagtgttgaaaagcaaagatatcaccttgaagacaaaggtgcacctgacctaagccatggtattttcaatcacatcatatgcatgtgaaagctggacaatgaataaggaaaactgaagaagaagtgatgcctttgaattgtggtgttggcgaagaatattgaatataccatagactgccagaagaacgaataattctgtcttgctcctcaaaagcaaaaatggcgagactgcgtctgacatactttggacatgtgtcaggagggatcagtctcgggagaaggacatcatgcttggtaaagtacatggtcagtggaaaagaggaagaccaatgagatagactgacacggtggatgcaacaatgggctcaagcataacaacgactgtgagcatggcacgggactggtcagtgtttcgttccatagcacacagggtcgctatgagtcggaaccgactagatgacacctaacaacaacaacacatgattactattagacaaaattattgcaatggtggtttctcattttacccagtcacaatggtgcagggatgatatcaatattggaacatgacgataatgctacaaaaagaagataacagagtaaagctctacattaagcatcattggctataaggttcacaagcatgagcactaaactgggagtctagtagcctggatcacaggctacacactatctttagcaatgggaccctgagcaaagaaaggctttagctttcatggattttaatgtctgtatttgtaagatgaagcagctttaccaaattacacctatggttatactggttctaacagcatcattgtaaatcaggatcaaatgccacagcacatctgtgacaccttacaggaagccatatacagtagagcaaaaaactgaggtatcatgagtttccactgtaaaagataataggacttttcacattcagttggctgtccaaatggtagaggaccctcacatcaaattaccatattttcttgccaacctcacctttcccacttgagatcattttgcaagcactgtgctaattttttacatgctgctgtaaaaaaaatcagcatagtaaaaaaaaaaaaattagtggacttatgaaaataccttgaggggggagggctcagttggcagtctttaatttgcataaaatacagtagatctctctatatgtagaaaatcccaaaaagtccataagaaaacttctagagctaataggaatttagcaaaattgcaggatacaaggtcaacaaacaaaaatcagctgagtttctatataccaccaatgagaaatctgaaatagaaattagggaaacaattatatttataatagcatctaggagaataaaatacctaggaataaatctaaccagggatgcaaaggacttatacaacaaaaactatacaacacatgaaagagattaaagaagacttaaataaatggaaagaagttccatgttcatattgttaagacatcaatactacccaaagcaatctctagactcaatgcaatcccaatcaaaattccaacagccttctttacaggaatagaaaaaccaattcgcagctttatacggaatggcaagaggcctcaaataaccaaaggaatgttgaaagagaagaacaaagtaggaggacttacactttctgattttaaaacatactaaacagctacagtaatcaaaatagcctggtactgggataacaatacgcacatagaccaatggaatacaactgagtccagaaatgtagtcacacttctatggtcaactgatttttgacaagggtgctaagtccattcaatgaggaaagaagaatctcttcaataaatggtgctgggaaaagtggatttcaacacgcacaaaaattaaacaggatccgtgcctcacaccacacacacaaattcaaaatggattaaggacctaaatgcagaaactaaaaccaaaatattcttagaagaaaaaccaggggcaatgctgtcaggcctagcttttaacaatggatgagctcataacaaaactacaaatagcaagagactaaataaataaacgggacctcataaaaactagaaacttttgttcatcaaaagactttaccaagaaagtgaaaagacaagctaccaactaggagaatatcttcagaaaccatatatccgacaagaatctaataagcaaaatacatacaaaattttgacaacttaacaaaaagataaaaaaacccaattataaaatggacttcaatagacatttcaccaaagacgacattcaaatggccatcaaacaccatgaaaagatgctcagcatcattagctatcagagaggtggaaatcaaagccacagtgagataccatttcacttccactaggatggctaagattaaaaaaaagaaaataacaaatgttggcaaagatgtggggaaattggaacccttatccactgctgatgggcatgcaaaatggtacagttgttgtggaaaacagtgtggcgattcctcaagaagttaaaaatagaactaccatatgactcagcaatttcattcctaggtacatacccaaaagacttgaaagcagtaactcaaacagagacttgtgcactgatgttcattgcagtgctatacgcaacagccaaaaggtagagacaacctaaatgtccatcaacagacgaatggataaacaaaatgtggtacatacatacaatggaatactaccccaccaataagaaaaatgaagtcttgatacatgctacaatatagatggagctggaagatatgctgagtgaaataagttaatcacaaaaggacaaatactgtatgacctcgcttatataaaaagataagaaaaggcaatatatagagagcaaagtttattagtggttaccaggggtgagagaaagggggaaagggagggttaagggtgatggaaatatcacattgattaaagatagggttgcacagctgactattgtaattgctgtcaatgagttgtacacctgtgaaaagctgaattggtaaaaattatgtgatagatgtatttacaacaacgactaaaaacaaaacaaaaaagcagctgccgaggctacttaagtacaaccaaaaacctgataaaatttgatttcttggtttggaagtctagggtcttggtttcatgggacatcccagttaattggcctaataatcccagttaattggcctttagttcttctgttccacttcctagttaattgcttagtgcctggggtcttaaaagcttgcaagcagccatccaaggaacaacaattggtctctatttgtttgaagcaacagagaaaggagagtcaggaataggtggagggtatggaatgtgtggctaattgcctccatgaacaactgcctccttgccatgaggccagaactggatggtgcctagctgccgttgccgaagattttgatcaaagattctatagaataatcctgactagaaggtagaaaatgcaaaacagaatttaaaattctcatggactccagacttcctggaacgatggaggctagatgaacccctgaaactactgccctgagacaatctttaaaccttaaaccaaaaatatcccctgaagccttcttaaaccaaagaatagtttagcttaactagtaaaaaatgtctgccttgagcattaaggtcttttaagaacaatctccttgggatctaattgaaaacagcaactttaaagattaggtagggaccttagggacagtgaatttacattaatggagaggaacaactcagaaatggagggtgagaatggttgcaaaactcgaagaatgtaatcagtgtcactaaatggtacatatagaaactgttgaattagtatatgtttttctgcacatattctgaacaacaacaacaaaataaatagaattaaaaaaaaaaaaaaaggtagatctgggtcccatgcagaaagaactggctgttaggattctagtgggtctgcataaggcaagagagacaaataaagttgtaaacatccaagcacatcttgacagccacattacaggcctctaatgtaagagatgaagctccatgaactgggcaaggtaagttaatttagcttcccaaccacagcacccactgagaatggaatctctccattaccgtctgattcctgtctcctatctacataaagctttgtctcagaaactctttggtggggatccatttgtctttgtgtcacttggagaatggccaagcctcctatttatgtgatttattgacactttataggtacctttagtaccgagtacgtagcattgttctccaaatgcaatttcaactcacagatgactaaacgccaactttgggaaggaaggtaatgatgatctgagaatacctgtggtaggatgttaaactcctacgtaagaacagagggcatgtttaatttgctctctgatcaatatccataatgctcaataacgttaggttttcaatatcaggcatccgctttgctatcgatacttcatctttgctacacaacaatccctttaagcgatctcaaaatgccaagaaattttactactctgtttttccctctaaaagctggctctaaatatcagtgaaaggagaaacttgccttaaaatcagctcttagcaatatctatctattgatttatgaccttgtttattgctggatgtaacttagttagggagagttcatatttgtatctcaacagataccccacaacggatggttctgtacacaggagcacctagcatttaagcttcagccattgctaaaatctggagtatggtccagaacaaactttcaggaatatcacattatgctccatttctactcttgtgccttccacttcctctgtccccttctctcagtttaaacgtactttgctgtttaagtaagcagtgtggtggctggcatttaggactatctctgctctgccaggaatgccagccatccagacacagcactgtgtctgggtcctggaggctgctcagctctaagcctttctgatggtccttctcccactctgcatagctttcatttatagttacattctactctctcccaaggtactgaagcttatatgtggttccctctgtcttcccacctatccctttcaatgttgttattagttgccatcaagttgacagaacaaatgtttcccagtcctgtgtcatcctcactatcatgaacatgtttgagtccattgttgcagctctagcgccaatccatctcattgagggtctccctcaccctcactggctctctacttcaccagacatgatcgacccctcctaacaatgtgtccaaagcaagtgaatcagataatgctctgttgtgatccataaggttttcactggctaatttttggcagcagattgccaggcgtttcctcctagtctgtctcagtctaaaaagctccactgaaacctgtccaccatgggtgaccttgctggtatttgaaatactggtggcacagctcccagttttgtagcatcacgcaagccaccacagtaggacaaactaatagatgggtggtggatcccttttgctacacccattaaaattatatctatgtttacaactcaactcaaattcctaggctttctggaccaatgagcattcttgctcaggcatggcccatgtgtgtgtctctggtatagatgttcgattcagaacacaggaagttagagctcagaacatggcatggagggagaaagaattgatgtctctcccttgaacttgagacacccagatgtgattgaggtgcttcggggaggagaggaaggcttgtcaatgtcatgggcagtcaaggggctaaacaggaaggtgtactctaagacaggtcttttcacactgtaatgtgcacatgaatcaccaggggatcttgttaaaatgcagatcctgattcagtgattctcagggggaatctgagatgtaatattttgaacaagctcccaggtgcccagtgctgctagtcttgtgacctggcctgtgctttcagtaacaagcctctaggagaagctatgagaggtctagctcttccatgggtcacttggtagcatgatgtgccattgcacagtctgacttgggctgtgctgttggggagcagtctgagtgtacccgtgggcccgtgagttggggtgggagtgtacggggggaacactgaatagaaattcctcgcaaagaggaagggccacccatccctactgggaaagtttccctatttttcccaccttggacaatcaatgttggaatttaataaggactctagatctctgacatcatggtggcaaagtgagctcttcattcttgcagtttccttcatcagcccatgctcatcacaaaggattacccgttataataaatcactgttctggggttgaatgcttgaactctgaggccatttactagtttaaatcctggcttttccacttgttagctctttgaccttgggtaaattacttaacccctccatgcctcagcttcccctttgtaaatggggataattaaagtccctaccagataagatcagtacaaaggctgaacagttcctggccatggtaacgctcagtaatttttaggtcttgctattattattaattttttgtttaatgcaggtctcttgctctttaattaaaccataaatgtatagtctccttaagggatcctatctttcacttcttaacaccttctcattatctgatacctggcatgtaggtggcaaaataactgcgttgagcaacaaccaaaagtggggacatgttgttgtggccttctcagcttctaaaaaggcaggttagcagacaccagttatcattttacatctttgccatgtgttctgtggctgtagcatgatgccacattacttaggaagaacagaagagggctaaagaggcagagatcctactagtgccctgatattactgcaggctcatgctcagggtgtttcatgcactacttcatttaatgcttgccacaaatctctcaagtagaaaagaaaaaaacattatcctcattttcaaatggggaaactgaggcactgagctatctataacctgcctgaggtcacccagccaatacaacattgtgatgccaggcccatgtcctaggctaccatgccaagtaagacccagcaaccagcagaagtcccaaacataacacagaacaccatgcatcctactgaatatagctgtcattagtaacagataaggactatgattaaaattatttattaaaatatgtatattgactatcatggcaacatcgtcttaattatgttgatttaactggaaaataaataacgtttactttaatgttattagaatctctattcaaagtgtatttttctcctcgtgtattacagatgataaagtaatcttaagactgcaagcatacttaaaggaaagaacgctttcgcattcttactttgagaaatgtggtgcaaaacccacaatcttagttaaaaagagagagagagaatgtggcaaagagtttcttggataaaaactacacacttaaatcctgaccttcaggccatatcatagattgagtgctattagggtctttatgaatgtttaaagtgatagcattccactgaaatttaattccaaaagaacttgcgaatgtttaccagtgacagagaatatcctgtctacactgacgaaattatacagtaaaataaaaggccagttatctgcaaatgttcatctgtcattgtttttaagcctaacatttttcactatatatttatttggctcttatgtttttcaagttacttttcttttttaatgtcaatgagagttaaaagccatgctacttaaagttttgccaaataagcacaaagctaaccctagctaaagaaaagaaatggaaaaaaaagcagcgtccatgaatttttaaaagttcatacataatatatcacaaaagcaggacgaataatatagtgcatgggctttaatgaaaagatccttgaccatttctcagagactctgagatgtaatcaatacccaaaaaggtatcttggggacaaagccaagatttatgatatttgggcagagagtgacactttctgcatactgtatcagctgggggacatgatattgaatttcagagaacacaagaaaggaaagtatttttatctgcctgacaatgcttcaaggatgcactttatggttcacttgcgacatcatacttgatggaaggaacataacatcctgaacaagcgttctgaaggcatcggggaaactcacgtgactctcaacatcagtttgtgaccgcgtcagactccggcttctttccagctctgaaagtaaatctccggaagaaagatccaggatgcgcgagtgaagtttctaagcaaaatcaagcagaaacatgtcatagcggtgatttaattgtttcaaaatcctggctgagacagtgaagtcaaaaaagagttcacatatgtaggttagacagattagataatacatacatacgtaccctaattcaaaaggtttattctagtttatcggtgaaattaaccacttgctggggcgttggttcagagtcatggcaaccccatgcgtgtcagagaagaactgtgctctgcaacgctttcaatggcttattttttaaagtagattgccaggcctttcttctgaagcttctctgggtagatccgaacctccaacctttcagttaggagccaaacactttacccacttgagccacccagggaccttggagctggcccctgactcctggaaactctatgcataatggtatgaattgctgcctggtcctgtgccatccccatggttgactgtggatctgaccattgtgatccacagggttttcactggctgattttctgaagcagatcaccaggcctttcttccgtctttgtctggaagctctgctgcaacctttcttccatcttagtcctagccagacataaacctcccttgagaaatgtgtactggctgttaatgaggtgcactggccagaactgagctcaggtctccccatggaaggtgagaattatactactgaaccaccaatgccgacatgggtatacatgtgtgtatatgtatgtgtatacacacacgtgcaaattgtagttaataaacaataatcatgttttcatagtctgtattggaaaattaagcaatgagttaagtagtagctggaaggtagtaggaaaaatgggaatacccaaatatacttattggctagtatgaaaattaacttttgatattcacattgaaaaacaatcaccatgttaaccttattatgttgaacagtgatcaaaatctgagcaaataattataaaagtgaccttatttctaaacagcattgatcttgtgaaatcttccctcggacacattttaactcaaagtcattaatgtcaactgttgggaacaattaatgcgaatagaaaataattgcatcagggatctggggacttggaagatttctgcattaatattcacatctattcgattatacactcaattctttatttcagttttacttgggaggcctgctaaacctgggacatttcactatattaatctttatagtaattactaaggcttttctgtggacagcaaatttgatctgcttaattgtaaaaacaataaaactcgtgatttatgtccaatgtttccactaggctgatgacattttaaaaatggtgcttgtagcctggtttgtcttggttacaacttttgtgacttcagacactaaaaaatcgaatcaagtaagtaaataatgtggctaagcatgtctccttcacctctgacaagttttcctgccccttttcctccctggaaaggtcgtgctcatactgaggctgatccaggaaatgtctaagattctgtactggtaattaatattaggattatccctgagtgaggggttgccccatcagtcacaacccccgtctttggcccagcggatctaccataccacacattgtcacagggggatataaactccactaaaaggagccacattcactctgctccttatctgactcctcttaggctgggttgaagggaccctgggtactggtggtgcacatggttaatgtgcttggctgctaactgaaaggctgccagttcaagtctacctggaggcaccctggaagaaaggcctggaaatctacttctgaaaaaccaccactgacaaccctgtggagcacagttctactctacggggtcaccacgcatcagaatcgacttgacggtagctgctaattttaggctgggctatattgggagccctgtggacgtggttagttgatcagtcttcacacacttactctgcagctactaaaagccgagtcctgtggcaggactgtgctctgtccttctccaggagaaacggtgttttatctgctgtgggtggcccagttttcctccttagtggagcttcagatcactgcttgcttcagacctatactcttgcttctttcaaaatgtttgtggaggaataaatcttaaattggttgcctgtttctttgaaaattcaaatttctccaacagcactaagacattgacaaccagttgttgttgagttgactccgattcatggcaaccccatgtgtgtcagagtagaactgtgttccatgtgttttcgatggctttttcagaagtagattgccaggcctttcttccaaggcgcctctgggtggtcttgaactttcaatcctttggttagcagctgagtgggtgataacaacattgtttctggacgactgttataattcttacttcaagctccccctagaatctgagtttcctgggagaaaagattgggtttttctcaccatttaatctcctggacctgtcacagtgtatagtattcagtaggcacccaattaatgcttgttgtagtctataaagaaaaagatgtctatttttcccacccatatataggtttaaatattaagagagtgccaaaagaattataacattctgaacctatgaatacatttattaatgtgaaaacagtccaagaagttatgggaaatgacattcaacaaaagaaatgatgattttgattggtatatcatgtgatttgagagaagtgtcctctacagattacagatatcagacttcttactcagctcatgattagacttcactatttcttcccatctgatacatgatgtcacccttttttctttctctacgaatatgtgcatgtaaaatcccaacctcataaatgagttatgttttacggtttgtatccagatagtcaattccctctattcaacagatagtcggcatgacagaggcaccaagtacagggccaaggagccaggagacctgaattccagccctaaggcatgggttttacagaatctcaggaatgtaactgaacttctctgtctcagcttcctcacctgtgcaaagggatagaactggctacttaacctacctcagaggtagggagaagcactgacagtcagaaggaataacaaataagatgccaaccaacaaatcacccagttgccatcaagttgattctgactcatggtgtcagagtagaatggtgctttatagggttttcaatgctgatttttcacaaggagatcatcaggcttttcttcagagggacctctgggtggacttgaaccaccaatcagttggttaacagtcacgcacttaactatttgtaccaccaagggattccagtaaacaagatagtatgttgaaaccacaaagtcttataccaatctattgtcgtatttgagagttggtagtggagagtttattaaatggtaaggtacaaacaagtagtttccatatatcgaagggaatggagaaaactaaaaactgacttagagaaaatctacttccgtgttaaaactggaggcaagaaaatggtaggaaagtattaacctaccatacaaaaaaaaaaaaaattttttttttttttcaatgtcccttaaattaccatgaaagctctaaggcccacagatgctacatttctaataataaggattttttttttttataaaaggtttatattttaatatatgtatatgtacacacagagctctggtggtgcaaaggagccctggttgcacagtggttaagtgatatggctgctaaccaaaagatcagcagtttgaatccaccagccgttccttggaaaccctataggtttcctacagactatgactcagaatcaactcgacgacaacaggttttttttttttgtatgtatatacatacatatatatacacacacacatataaatatattctcagagacatatatatatagcatcacttcctaaatcagtaatgtgatgttatctgttttacgtcaggtctcagtgtaagtagtagaacataagcatgggaaattcaattaaaataattatcagagaagaaaatattctttgatggttatgagtgtggggagggatggagaggggtattcactaaccagatagtagacaagaactattttaggtgaagggaaagacaacacaaatacagagaggtcagcacaactggactaaaccaaaagcaaagaagtttcctgaataaaccgaatgcttcgaaggccagcgtagcaggggtgggggtctggggaccatggtttcaggggacatctaggtcaactggtataataaaatctattaagaaaacattctgcatcccactttggagtggtgtctggggtcttaaacactagcaagcagccgtctaagacgaattgattggtctcaatccacctagagcaaagaatgaagaacaccaaagacacaaggtaaatattagcccaagagacagaaagggccacataagccagaggctacatcagcctgagaccagaagaactagatggtgctcggctaccaccgatgactgccctgacagggaacacaacagagaatccctgagggagcaggagaacagtgggatgcagacctcaaattctcataagaccagacttaatggtctgactgagactaaggggaccccccagaggtcatggtccccagaccttctgttagcccaagacaggaaccattcccgaaggaactgttcaaacagggattagactggactgtaagacagaaaatgatactggtgaggagtgagcttcttggctcaagaagacacatcagactatgtgggcagctcctgtccggaggggagatgagagggcagagaggcagagggggacagaagctggttgaatggacgtggggaatacagggtggagaggaggagtgtgctgtctcattagggggagagcagctaggagtacatagcaaggtgtatataagtttttgtatgagagactggcttgatttgtaaactttcacttaaaacacaataaatgaaataattgtcagaaagagtgtaactgacatgagaatgttatgaccacctaagagaagttcatctgcttaattagagggcaaattccccatcctatacgtatctatagtccatgtttactgttagtgtctgtcacgatataacccctcttgcgaaatacttaaactttaaatccttagcccgtgaatcgagatgaatacctattgttctggttttgacacgacaggtcacaagattactcagtacggtattgagcctgacttcacattgtctattacattatctcagtaaccgaaattactctaggctctagaaatataggcacctaacatcacaacttttcaaaccagaggtaagagagagctcttttcgctcaaatgcttccttttgacagtaacggtctaatcctccctttctgtcagacaggtctcattgcctcaggaatgtgctccctcctacctctaagttgaggctttgatccatctttccatgggacactctttctgctcttgtccatctatttaaaacttgcccattattcaggatgattctaaagtccagcttgtaaggttgtccatcttctcaagcccaccctgacttaacaccgtgatggactctatcacttcctcaatttgactctttatctgaagtccaccattatggaattctttcctgtgtgctagttctattttcttaacggaatgagcagactgagccctacatttttgctccgtccctgtagcagggattggctatatatcataaaacctattccctcttctttctgggcacacagttggactgtatttcccagcctcctttgcagttaactatggctatatgactaagttatagctaatgcactgggagcagaagtgatgtctgccctttctggtctggcccagaacacctcatgtatgtgattcttcatgttctttccccttctacttgcttgatgcagtcaactgagcacagcaaccttgaaagctacatgttgaagagggagccatcaaatggaacgggtttgtgttcttgaatcaccaactggaagacagccactctggggtcaggaatacctgttttggactttacataaggaagaaataaacttctattgggtttcggccattattcatttgggggtttgtttgttatcatagtgttaccctggatgatataacccttctctgagattaacactcagcagcatgcagggtagccactcaaaagaatgaatatagcatgaatacatatatatgattacatatatacgtgtatacatgcatgtacacagtggttaaaagctactgcaatctacagctaccaaacaaaaggtcggcagtttcaacccatcagctgctccttgaaaaccctttggggcagaaactctgtcctatagggttgctatgagttggaatcgacttgatggcaacaagtttggttggttggttgttttttggggtttatatacttccaaagtttgaaaaggaatgtgtgatttttttcatgtcaggatttcagaagttattagctttagaagtaaagaggaaagtacaaaaagcattgtttaaccattgctcctttctcttcatccagattcagtgagagaattaatctaacaccataagcatacatacaattactctcccctctatttctattaaaaaccaaatatctgtacaaaagagaagttatgagagcaaatatggcatatatctgactaatgaactctaccaacacaagtaatttaggtttggcaacagaaggtggatgtgaattaatgtttttaatctgatctgcttcaatccccttgatttacttaatcttgatgggcactcagctgaaatatcctgaattattatattctccagagttacttttatctcccttgtagaaaagttctcttagtcgaaggggaacggcttctgtgcctataattcttgaattcctgttttatttacaaagtgaggacatctgttacttccaaaccattgatatctttctttatctaccacatgtccgtaacttctattcacagtacactccagcattagaaggtattgttctaatttcaaagttctgtgttgggaaatttggggaaggagtggtagtagctctagggatctgctcactcaccactggtatctttcgccatgtagctcatgaccaacagatggaataccaatagttgccctggtcactcaccacctcactgaatactactcacctgctcctgctcatgcccttgctgagctctggtgctcgaaacatcttggcaggctgctcattggacttggctttatttagtggtgaccctccttcaaattgaagtcatcaaggatgtgattttacttggatccacaatcaacacccatggaagcagcagtcaaaaaatcagaagatgcattgcactgggctaatctgctgcaaaagacctctttggaatgtggaaaagcaaagatgtcaccttgaagacaaaggtgcacctggcccaagccatggtgttttcaattgccttgtatgcatgtgaaagctggacagtgaacaaggaagaccagaggagaattgatgcctttgaattacggggttggtgaagaatattgaatataccatggactgccaaaagaacgaacagatctgtcctggaagaagtacaaccagaatgctcctttgaaccaaggatggcaagactacgtctcacatattttggacatgttatcaggagggaccagtccctggagaaggacatcatgcttggtaaagtaaagggtcgttgaaaaagagaaagatgctcaatgagatgaactgacacagtggctggaacaatgggctcaagcataacaaaggttgtgaggatggtgcaggactgaatagtgtttcgttctgttgtacacaggaccactacgagtcggaactgattcgacggcacctaatgacaacaacaagtccttcaaatcttgtggcctggatccttcattgatttcttggatgaagaacttctgcttctttggttttagcttgattttcaaatagtcctgtttcctctttggaaagctgatctttcctcacagcttccagaaagcttgctagagccccatttctgctcccttaactgaaccctgggctggccctgggctgtgcactgcatcctatttaagccccccatgaggaaagcaattctggagtgggctattataaaacctcctgagcatcttttgatattgctaacttcctgtggtttcttgtgagttctccattctggataccctctgctgcagggatagaaaacatttgtggtagatttgacatatgttgaagagacttgttttaaataaggctctgaattagatacaaccagagcacaagctttgttccttctgttgggtaataaggcaatttccataagcatgctaaaggctctgaaaggaaattcaaggaaatttcctgaaatagcttacagcctgcttaagataatttttctatggaagttttactggccaaatgatcttccaaaaatcccaaagttctaccttattcacatattaaaaccaaaaccaaacccaaaactgaactgaagccaattccaactcacagcaacgctgtaggacagagtagaactgccccatagggtttccaatgctgcaaatcttttttttttttttatatactttacttgaaggtttacagaataaactagtttctcattaaaaacttagtacacatattattttatgacattggttaacaaccccacaacatgacaacactctcccttctcaaccttgggttctctactgccagttttcctgtccccacctgccttctagtccttgctcctgggctggtgtggccctttagcctcattttgttttaagcacctgtctaatctttggctgaagggtgaaccttgggagtgacttcattactgagctaaaagggcatctgggggccatactctcagggtttctccagtctctgttaggccagcaagtctggtctttttttgtgaattagaattttgttctaaatttttctctagctctctgggatcctctattgtgatcccttcagagtagtcagcggtggtagccaggcaccatctagttgtattggaaccaaggctataaatgtttatggaagcagactactacatctttctcctgtggagcagctggtgggttcaaatcatcgaccttttggttagcagcagaggacttaactgccgcaccaccagggctccttattcacatattagacttctgtttgttgccacactcagaaatgtgatttttcatcagcctttccaaattccatcagaagatattatggtagactcctggttcacatttcacaggcttcattccattccattaagaatttattataaaactgaatattatacaactgtctcttacataactgagtattatatggtcatttcttagattcacaaacatttgagccttgggcagaatatttttggataaaagctgatgtttaattaattatgccattatttccactttggaacaccaggacaaagcataatatctgccatgcagctgttctgctgacgtgacacaaagagtatgccctctgaatgctctcctggatgcccttaaaaaaatacgtccatcgtgatttgatctcacgtcagagtctgaaacttttatagctttttttttttaagtcatctacaacagtccttactgcaattattattttccctgacaactttagattcccttgcacacccacctctaggtgccctgagtgcattctgttctgccggtgcctctgcaaatggcatggttctgcatcctcttttatacttcttctctgggatccaaggttataagagacatttgaaacaattattccacagctatattcaaaaccttcttcaagggtccctgctaccatgacaacctgatcattcagtggctccctaggggagcaacgtttggttgggtgacagagaagtttattcagggtctctgcagtgcagaccaatcattggagtatctgcaaaaccaaattccttgccatcaagtcgattctgactcagggtgaccccatgtgttacagagtagaactgccccatatttcttggctgtaatcattatgaaagcagatcaccaggcctttcttttgcagtgctgttgggtgggtcttaaaagccaccttctttggttactagtcaagatctgtcctatcttttgcaattccattaacagtgccctgaggaccctcctggaagatggatgagggtgaaaagaaggacatcttgccatcaggagcctctatattaattagttcaacaagaagcatttatgaagtacctactatatacagagtcctgactatgaactatgagcagactgaaggaagctcattaattgagtttacaatatcaatgaggagcccaaccacacagatcaaaaaaaaaaaaacacacacacacacacaagaaatcttgaggtggggcatgcaaaaaaagatcatggtagtgttaggggaccctagaggctgaagacacctaattaattagtactccactatttatcactccattcccagtcactccttcaccacgacactcacttcctttaaattgttttgcagactctccagagagcccacgaagagtccagatctaactggctcagagtagccagacacatgcagcacagaccatgacaactgtcaaacaatgctgggctgccatgcatgttcagtaacacaagagaacttatgtcaaggaaccaaaagactcatgccaaggaaccaaaatcactagatctgtatcattggcagtagttgagcccatttcaaaaccaaagagtctgtcagccttccgtgccaagtctcagccccgccttgtaatgaataatcagtagaaactatgaatagtcaaaactttttgatcctgccccctgccttcttccaccctttaaattaatatgtataagtaaaattgtaaattgctcctgcagatcggggaactcaatctgaggttgatatctctgagttcttgcttggtagcctgcgaattaaactctttcttcctctcaaagacaacatcttagagtttggcttcttgtaaactctggcacagacctattggtccggtttcagtagactgtgggtgatatcagggtgaggcatcaatgtgttaacacagttaaatctgcagaaaacaataatcagttgccactgagtcaataataaccccatctgtgtcatgatagaattgtgttccctagggtattcagtggctgatttttcagaacatgtctctgggtggattcatacttccaatctttcagttagcagttgagtttgttaacctttgtaccacccaggaactccatagaagataatatgttgtacaataactacttcagcaacaggggattacctctcactcccaagcccctaaacctcttggtctgatgtttttacacaaaacgaaaagaatccagaaatacatataacagcaaagctacagaatattgggaaacagggtgtgggattagggcttctatagtgggccagtcaggcctgtgggcaggtaaagagcctgtttagttgcttaagagtgcttcttacttagtttgacaatcctaaaagtctcagaagcttctcttttgtcttctgtgattgtaatctgcaggaggaagtgattcagtacagaacccgcccggagcctattctgggatttaagagatactaagtgccttgaaatttccatttttatcattaattactttcacaggtactttaataagtgcttcccaattgcccccgctgttttgtaaaattatctacactgcattttacatttttaatcaaactgtatttttgaaatatctcctggccttcggaagtttttgcttttcacatgtgtgacaattttggggaaccaattactttcccctctaatttcatttaactaaagagattaaaaaaagagagattggggggaaaaaaccccaaaacccaaagctttgactttctgtttttatgagacctattgtaaacagcacggatggacaccattgagctcagcctaccacttagtaggaagacatgaactaactctgttctgtggggaaggaggcactgttgtcaagtccctttcctaatcctacctcatgaatcctcacgcaactgtgaggaaggggctgctactgattattaagaaaaaaaaaaaaaattacaggtgaagaattaggtaaccgaagctaaggaacacattcaaagtcacaaggttacattctagtaaggtttagttagagccattatttgctctctggcttgccttgcttctaagatcaaattctactacatcctgctgcttttcccatgaacgtggtagccaacgcagccagaagctgtttagccattatcaagcaagaactgctcctcctgtccattaccaaacaaaaccttaagggacaatgatgatacccattagcagctgctcagaccaaggggaacctgcccccttctgtccattgtcctcaaaggctgaatgtggctcaagccagtttactagtctacacgccaaagaaaaacatgcaatatgtcatttgatttcttgactgctgcttccatgggtgttgaatgtggaaccaaataaaatgaaatccttgactatttcatttttttctctgtttatcatgatattgcttattggtccagttgtgaggatttttgttttccttattttgaggtacaattcatactgaaggctgttgtctttgatcttcatcagtaagtgcttcaagccctctttgttttcagcaatcaaggttgtgttatctgcatatcacaggttgttagtgagtcttcctccaaacctgatgacatgttcttcttcacacaattcagtttgttggattatttgctcagcatacagattgaaaaggtatggtgaaaggatacaaccctgacacacacctttcctgacttcagaccatgcagcatcctcttgttctgtccaaacaactgccttttggtctatgtacaggttctgcaggagcacaattaagtcttccagaattgccattctttgcaatgttatccataatttgttatgatccacacagtggaatgtcttagcatagtcaataaaatgcaggtaaacatctttctggtattctcttatttagccaagatccatctgacatcagcaatgatatcctttgttccacgtcctcttctggatctggcttgaaattctggcagtttcctgtagatgtactgctgcaactgcttttgaatgatcttcagcataatttcacatgcattgatattaattatactgttctataatttctgtattctgttggataaccttttcttttggaatgggcaccaacatggatctcctccactacattggccaggtagctgttctccaaatttcttggcatagatgagtgagcacttccagcattgcatttgtttgctgaaacatctcagttggtattctgtcaattcctggagcctggtttttcgccagtgtcttcagtacaactgtgacttcttctttcagtacaattggttcttgattatatactccctcttgaaatggttgaatgtcaaccaatttttttttctttttagtacaatgattctgtgtattccttccattttctcttgatgcttcctgcattgttcaatgtttttgtccatagaatccttcactattgcaactcgagccttgaatttttgctttagttctttcagcttgagaaatgcagagcatgttcttccttttcagttttctaactccaggtctttgcgtatttcattataatactttctttgtcttctctagccaccctttgaaatcttctgttcagctcttttacttcatttcttccttttgctttaggtactctatgttcatgagcagtttcagagtctctgctggcatccattttggtcttttctttctttttaatgaccttttctttcttcaagtatgatgtcataccacagatcatctggtcttttgtcattagtgttcagtgcatcaaatatgttcttgagatggtctctgaattcaggtgggatatactcaaggtcattctttggctctcgtatacttgttttaatttccctcagcttcacttgaacttgtgtatgaggaattgatggccttttccacactcggtcctggcctttttctgactgatgatattgggcttctctattgtctctttccacagatgtagttgatttgattcctgtgtattccatctggcaaggtccacctgtatagtcaccatttatgttgttgaaaaaaggtacttgcaatgaatatgtcattggtcttataaaattctatcatgtgatctcctgcatcatttctatcaccagagccatgttttccaactaccaattcttttttgtttccaactttcgcattccagtcattagtaattatcaatgcatcttgattgcatgtttgatcaatttcaggctgcagaagttggtaaaaacttcaatttttttcatctttggcattagtgattggtgtgcaaatttgaaaaataggtcgtatgaactggtcttccttgtgggggtatggatattattctacttcccttacttggttcaaatatagttgattaatttattcaaaaacatagttttcttattctttattattattattactgctattattgatgccattgtttccttagatccctacattctttttttgtatttaaatttgaattaagtgaaaaataaataaaactaagcagaaaaagcaaaaatttatggagtgcccactgtgtgccaggtgctgggctgagtggtcatatattttttcttatttaagtctcacaatcaatttatgaggtataaactatcatgatctccatttttctgatgagaaaactaaggcacaagaggggttacgtaactgttcaaatcccagaatatgaacctggttacagacttcagagctgcccccttaatcatacttcattctctgccacgatgttgtcttatccatattttagacactggagtacaatgatgaacaaacacagcccttgctaccaaactacttttagtctaatgggtgagaaggacaagctaccagcaccttcaatgtagtgtgtcatgtaagactaggaaagacccttcctcaggcaggcatctctaggagggctttccatgggaagtgatagttcagttgagacttcatgaacaagaaatgattactcaggtgaagaatccaagaaaggcatggagaggcaagggaacatgacatttttctgcaaagagttcagcaagaccacagaggctatttcatggaggtaaatggtaagagatgtgtctcagcaagaagaaggatctcaagtcacattgtaagtaagtaagtaggagtgttgagatttgaatccactctcttcaaaatacacggttcttcccctgttcctttgtccaccccacatttttccctaatgctggacttggctgggagcctccatcacagtcatctatgcaaacaaattaagctctagaagaagagacggtagatgggttttggggagagaatatagatgcagtggacatgcgcacagcttttatgccttctttgcatgcttctccctaacaggatccttgattatgctgcatgctagaacagtgcaagagttgccagcactgcagacatctgtactcactaatcctaaagccatgaagtgaccccttctgtgacgccaaagggttccatatgtctttcaggttataggcaagaaaacgtgccctgttgttgcaaatgtaatgaggagacattaaaataagaccagcgttgctgaacaccagaagataatctccaaggaaggaaaaatttctcagctgtgttttggacaaccaaaaaaaaaaaaaaaaaaaaatgtagaattgtttataagatgggtgctttctcccatgaataacgggatgattacaaccaatgaaacccagcatttgggagattacataagcactgagaccttaatgggctttaagattcactctcacaacactttacagcacaggagctagggtaaggaatagatgagagtcttgatgagaacgacttctgtgatgtgcgctcatttgcattttacaacccaatgtgttggttctaataagacaagttgctggagtcccattcattttggaacatttgtgaaggcctattacgtaaatgcaatttctgtgctgaatgctcagtgaaggcccgtaatcttacctcccttgatagttcatgggaagttgtgcattatcaaggtttcagactcattactttatgctgccttataggctttgttgctacagatccacatcccagtttccctgtagctttatccccaaagtagttttttaaatccactcttgctttaccccatggtaagaaatgcctcacggtgttataaacaagcggttggaaattgttatttatgtggcttcctaatagcaatttgaaatatagggcataaaattactagcttacaatattgttcagtattaacagtgggaagggtaatatgtaaaacagacattaaaagattaactgtaaaatacatttcactgaactaaatcatttcttggcaaatggcagtttctagctattacatagggttcatcaagtcaagcgcatttatttttatttttctatcagtctgctaaaaatattctctatttaaatttcaatttcgtggattttgtttttttcaggcattttaggggaagctgttggaaacagagtctaagaaaaaaatgatgccagactttcaactccaaactgttcattggtttccccaggaaatcctgcagcgagttgactaaagactcaactgtaacatccaagacaaagtacatggatatgatattacacacacttgtattaaagattagggagttataactgcatcagaaaatccagtaaaaaggcaaatcctccataggacataaaacaatgtttctactgtttttgcttcagaatctatagacactcacattttgtcctaatcaggcatgtctggagttcagtaaacactgagaatttgtgaaccaagcaccgagaaaggaggaggaaacagaaattctaatctcctagggttgaaattgtgaggtattaaatggatagttgatgtataaatacaaataatataatctctctattttcttctgagacggtcaccagttaccataatcctaaaattattctgccttctcaaaccctaaagatttattaattttcatgaactgctttgatggaaattttcttcaaagatgcaaagtaatctttctctgagttttcctttcattttatatcgtgtgtagtgtttctcgtgtgcagagaataccagaagtgagttattttccagaggaattgactatggatctacaaataactatcacaaagatatgacactgctcttagactcatttgagcaactataaggaagctcatattcccaaaaggtaattattattgaaaaactagggtttgctttgaatacttgtaactggttggttttaaaggcgatattgttttcctggagattgttggctgaagaccacagatatttttcatcaaatgctccatgttaacaattccaggggattcaaaacatttattacatacaaatgttgacttttgtgctcagctgttacatgtgggattggaaatatcttttcataaacacttttcaattgattgaaaacaaatgaaataagatgccttctaacttgaggcgtaaaaattcagtcatgtgaaatgggaaccacttattcagaaagccaaggatggagtcacagaagaggtcccccatctagtgggtcattatggggcaaagtccaggtccaaaagccatgaccacgttcattacattaccaaaacacctcagttaactagaatccgatggatccaaaccaccattagctgacatatttaaaacaaagaggaggataactacaaaactagcttttaagtattcaggataaatccttggctcagctttggaaattagtttccttccacatttgctatatctataaccaagaaggaaaccctggtggcatggtggttaagtgctacggctgctaaccaaaaagtcagcagtttgaatccaccaggcgctccttggtaactctacgaggcagttctactctgtcctatagggtcactatgagttggaatctactcgacgacagtgggttttttgggttttataaccaggaaggcaagatggcacctggccccaggtgtaacactgccaggtgtgactctgggcaagttacttcctccttcgcaatcttattttcctttagggatcataataatgatattagctcatacagtagtttattggaggattggggttcaagagaataaatgatgactctagaatctacagaaaccttggtggcatggtggttaagtgctatggctgctaaccaagaggttggcagtttgaaactgccaggagcttcttagaaactcttggggcagttctactctgtcctatagggtcgctatgagtcagaatcaactcagtggcactgggtttggttttttggtctacaatctatgcatctggtgaggatccaattacttaaggtgcttaaggacacagtaaatgcttgataaatgttagttactttcaggactagcaattttttttttttttttttttaagaatttcaagatggtggcggcagagcactgagccaagcatgaggactttccgagcatgaggccctgtgtgactgcccaggtggcacgccacgaagctagccctggctattaccatgtctggttatctctagactcagaaagaccctccatagtcaaagaagaatctgtgttccctgtactgaacttactgggtaacacagcagacttttaacttttgacgtactttctccataatagagtagcaggtttttttgtcggcttatttgtttttctgcctaccctcaactagtaagaatgccaaatgtgcgtgtgaaatttcttgccactgcataccaaaaatacgtcccaaaactgcttcctaacaggaaaaatacgttgcctttaaaaccagctgattcccaattcctaatatgagactcgcctctcctgaagaaagcactctttcggtagcactgaagaaatgacaatttgcaacacagctctcccccaccccaactccagaaggtgtgacgtcaccatctgggtacccagctgaggtagaacaaacacaaacaccaaaggcagagggaggtaaacatgtcctggaagatcagtttcgtcaatgctgagtcacagctgctttgcaatcataacatcaggactggcttcagtgaattcctgggtcactgtatttcctttcctgtccccacaggagggctgcccaggccttggaaggagcgcctgcccagacaggaagtatggcaggatgactgggtccaggctgaacactggcctccctcaggcccaggctgacagggcagagccagtgtctcgtgttcctagtctgagctctcccatcggacattcccgccttcttctttagtaactccaggtgccttaatactgcctggttttcctgctgcagaaatttacttgctgacacttgtcccactgctacccatggtccctaatgtgacacagagtttaaaaccagctcgaagtaaaaaccccgggggaggcaatcagtgaagatgtacacaatagcaaacgaggacttcagaattccacctcaaatagcctttcccgagcagtctcagtttttcctttgtttctgtgctgtctatacatggtttctcacagatacaaacacaaaagagcactatgtctctcctgcccactccctaagccacgatgtttatctacaattactagctgtcttaccgacattagtaataataataaaacagctgcccttgattctgactcatagtaaccccatctgtgtcagagtggtactcagctccacagggttttcgatggctgagttttgggaggtagattgcccgggctttctttggaggtgcctctgggtggactcaaatgtccaaccttttggttagcagccaagcacgttaaccatctggaccactcaggaactccgactataaataactgttagtacattgttaccacatgggccaggtaatgtatatcttacaatatgaaaattctttaagagtatcactcattaattttaccctggaccaagctggactctgtcacatggcaccaaagtaccacgcagccggctgctgttcaaaggcgtgattgtgagagttttaaattccttttcacatttacttcttgattctgtcactagactgcagaatcacctgaaggaattaggcagttctcgacatgatctcattatcgacatttatgttgatggatgttggctcttacagaattggaatctgcagatcaattcccttattagattctttctcactgccgccataatcattttatcacaccagctgcttctatcaaatgctgctctatcactacgtaatgggacaagagaaacagggtcctctagcttgttaccagaaataaaaatattttccaggttttaaatcttccttttctcagatcttaagaaactccctaatacttacatttataaagaggttactttaaacttactttcccataaaactatgctgcatggaagtgccaatgttgaacatgaaggacaatatgcacaatcctccaggaaacaaattttcctttctgctcagagtttcagatgtaaagtttcaaaaacaagtagcacccaagggatgaccttggctgctaggtagagcaggtgataatctcggtctctctctagtctttacagaagcagatcacctggtctctcccctgtcgagctgctgggtaggttcgaactgccgaccttttggttagcagctgagagcataactgttgtaccaccagggatcccttaatatgaagcatattcatccaaatatgttctaaagagtaatatcaaactcttcatagggggaatgatacaaataattgtccctatttcaacatggacttgcaatttctaggaaatggataatatagcttctcaggggttcttaatctgagagcccctggggtccatggatagaattcagggtgtctgtgaacttagaggggaaaatactgcggctttagtttcactgaactttaagttatcatttccttcagttatgaatgtagatatcaaactaaaggggtataaacttgtggctctgtccccaacagaaatcacagatatcttcacgtcacgtcaccagcaccaccggttaccgttgagttgaactggctcgtaatgatcccgcgagtgtcagaggagaattgtgctccatagtgttttcaatggctaatttttcgcacgtggatcaccaggcctttgttctgaggtacctctgggtagactggaacctccaacctttcaatcagcagccgaatgtgttaacattcgcactacccagggactcccatgttacattacagttgttgaaaatatctcaaaaaagcctgcatgctcctcattccttaaaaatgaagttaggcctgcaacttgactttattatttcatgcttcagaaataaagcacatgtattattacagtgtatatttttttccaatattttagtaaccgcactttaaatataactggtttcctttacaatcttacacctttgatttgatacatttaaaaatattattctgcaaaggggaccaaaggcttccccaatcttcaacacgggtccatggctaacaaatggctaagaacccccatgatctaactcctccgcagccctccgcctcccgcggcatgtgcagtagagaccttctgtcatggctctgactttccaaacctgtgaaaaaggatgagtggattttagccatcccaggtcctgcccttcaccttcaggacccggtgggactagccctggttggggcaggaacttatattaatttgaatctccactaaaataaattagctttcttttcattgccagactgagctctccagctatgatggttatgtattgttgcaatctagaccttaatggcattttagcccggtggtgggctcatgaagaaaccattttccaacttcaaaaggccgttaaaacatgtgcagatgtctggaaaattaatactattatctaactctcaccctttgcctgtagcagcaaaagcagagacaaggctccagaaagctatcagagatcaatacatggtcataaagcaaagtgctgtctttctggggagttcaggtggtggcaagtgaggaattgacagggcttttgaagagactttctcattagattttctgttgaagtcattcacttaatctgttaaaaatttaaagagagaatagggatgggacagaaggtagaaggagagaaaaagagataaagataattttctgccaccctacttcaatttggatgttcaaggtctcgaattctccagagtggaggcattcattcattcatatgacagaacctgaatttgtcaacgttaatgttgagcaaggtacagtgtctgttctaaggtattttgcatttagagagacttgtgctgcattctggaaaattctcagggtaaggagctattctcacagccagtttcgaggcttttatacagttttcagaaccactgcatattcttgtcctttccttcattttattaccaacagattttgctctgtaagtgcctgggtaccccaataagacttgaaaacaagacttcaattttttttttttttaaatcacagtggaagctttatgtttttaataaaggatttctcttagaaagttcttcaattttgaaagagggcaggggagagaaagtgttataaaagatatgtgtagtgggtttttttttttttttttttataagacggatggagctgaccagaaaaatttccctaggaactcttaacagggtattatatggagtcctctctccagaaagcactttgtaagaaaacctgaaaatattcgccacttatgaatcacacatctttttaaatggaaagttttccgtttatactcaagaataagcaggactattgatcaggattgcacctaactgtaagaaatagaaaacctgactagcagtggcttcaatatataggggtttgtttttctcatactgcaagaagtccagagataggtttcactgaaatgttgggagttccctgttattgcattacagtcttggagggggtgcaaacagtgcgcttagttgctaaccaaaacgatggaagttcgagtctacccagaggtacctctatagaaaggcctagtgatctagttccaaaaaattagccattgaaaactttatgggacacagttctactcttacatatgtggggtcaccatgatttggaatctatttgacagtaactagttgttactgcgtaatagcctagcgtatcctgactgataaagtgggtcaacgtgaaatgtcagcccaaaggaccaagtggtcaaagtcgtgtaaagcatggccacgcattagaaatctctgtaccacattttattttatagcaatgatcgtgggattgaacgagttgtcttccttcaaagttaagaatcaataaggactgtatcaagattggtttcagctgcaaaaaagagaaagcctgacttacactgtcttaaacttataaataaccagttgtcattgaatcagttccaactcatggttaccccatgtaggtcagagtagaactgtgctccctaggattttcaatggctgatttttcagaagtagatctccaggcctttcttctgaggtacctctgggtagatttgaacctctgaccttttggtaagtagggaagcatgttaacagtttgcaccacccagacactcctcttaaatttacaaacagcaaaaaacaaaaaaacccactgccattgagttgattctgactcatagcactcctataggacagagcagaattcccccatggggttaccaaggagcagctgatagatttgaactgctgacattttggttagtagccgagctcttaatcacttcgataggggtttatttttctcacatagcaaaagctcagaggtaggcgctccagtgctggggtagtgagtggttcattgatgtcatcaagggaccaaactctccccatccttctgctctgctttgccatctttactgtgtgggctcctgccaagatggctgctgcacatcctgacactgcctccactttccagataggaaaaaggggtgtcttggttatctagcgctgttatactagaaataccacaagtgggtggccttaacaaacagaaatttattttctcacagtttaggaggctagaaatccgaaattgaaaggggcagcgtgagaaagagattgtaggggcctaacatcctagtgttgtagcattgtttctgcatggcatgcatagttagcttttgcacaccccggtgattttgtgatttgtggtttgtttcctcccttccctctcccattctccatgattctataaagtttcaaattaacctatgttcctcttgaacaagcagaacaacgatcaataagatctgggacgagacaaccagacaatgggggcccatcttatgactgaaaccaggatggcatcagagtacctctaaagaatacccacagaaggtcaacatgtctgaaatgtgatcaacatgccccacccaccaccccgcaaaggggaactgccattctccagattctttaagcctaaaccctagcccaataaaaccctccattcagtctccagaagacagattttgaaggagcccattcccctctgtctctcgtacaccggtatacaataaagccctcttgctgcttatcacaccccgtctcagtaatggctttgtggcaggcagctcgaatctgtgttttaccgtaacaaaatcagggcactggctctaggggaagactttccctgtcggctctgagtgaagacccttgtctcttcagcttctattcctcggttccttggtgatcttcatggggtgtggcatctctcttcccccatctctgcttgcttctctatgcctaatctgctctttttatatctcaaagaagatcggctcaaaacacaccctacactaatactgcctcattaacataacaaagaaaacccattctcaaatggaattataactacaggtataggtattaggatttacaacacatatttttgggcgacacaatccaatacataacaaggggtaagcatgaatgaagaacaactatagctgtgtctgtctctctttattgggaagcaaaagctccagaacccatttctgtttaggtctcttatgccaaaactggatacacctagaagaaagggaagctaaaaatagtggacttggttttctaatctctaaaatagggaaaagaagggagaagagtgttgattgagtgtggtagtgttcatgagtgcagcttgtcaaatatgtctagttctctctccttctgagaacatgtcagcatgtatttcctgacccgtctgtggttgggtgaggccgtgtgactagttctggccaatgaattgtgggtggaatgctccagactaggtcatttaatactgatatgagacctttcagagcttctttctggcatggtgactatcaattttgagatggcagctgccccatcagtgaggtttcctgagtgtgtaagatgtacacagctcatctaatgacccacagaaacatgtagcctgagccagaagtaaatcttgttctttgaagcctctgaaattttgggattgcttgttgctacagcataacctagcctaccctgactgattcagtgagtcaacttgaaatgccagccataaggaccaagtgtcagaggcaaaagtagcctaaggcaatctagactccgtgtattattgttgttgttacctgccatcaagttggcccccaactcatggcagctccatgcacaacagaacaaaatcctgcctggttctgcaccatccccatgataagctgtggatcagaccactatgatccacagggttttcactggctgattttcggaagtagatcatcaggcctttcttcctagtctgtgttcgcgtggaagctctgctgaaacctgttcagcatcatagccacacgcaagcctccactgacggatggatggtggctaggcatgaggtgcacttgttgggaatcaaactcagatcttccgcgtagaaggtgtgaattctaccattgtgtattagagctctgtaaaccaactccaacttcggtggggcgataccttgaagctcactttctctactttaagtgcagtttagtggactttaattcataatattatagccgtccttgtactgcacacaggacacagacaaattatccctctcccccatgtctctgcataggtgagtggctaatgaaacatagcgtgctcaaggtaagccacgacatttaatatgaacttccagaatgaccatgcacaaaatataatccatgataacgagtggtggcagagtttatgacaagcctggttaatgatacggttcacatctctgggttgctgaggtgcccttaggaggaagacagaaaagctgggggcggggggtgggggccgatgagttaaagcattaatggcctcttcagttacagtaagtaactgattttatcaccaaatacagaatatcacatcctcagcagagtcaacggaaattcattcagttgtgacagtgcttttccttaaggaccccaaggctaccagtatgaaaccattgtaacagagggcaaatcacaggggagaggaaggagaacattagtgtggttcaatacaaagacggtggatttcttggctagctgttttaagtttcaccattgctagcttttcagtttaactactgtctctagtcttatcgtgggctgggagaggcaagccatatggatttctgccagcaaaatggttgggtccataacatatggcaacacagaatcttaaacaacacacttaggtcctaaaaatcacttaatgtaacttcagtgaggttcatctggcttgaaatgcacagaaagtggggtgtgcagcaaagaatatacaagtaattgctgatgcagacccttctaggtaatcacgagctagttctcacttgcaaaggtcaaaggctctttcgaaaatagcagtgagggaaaagaagatggccctgcataaggctatcttataagttataaggaaacttcctgggagttttcgatggctcacttgaaaggcagcactaggtaagtaacctgtgccttttctaaatgccacatactggatggctttcctctcgttgcatatgtgtgtacacacctcagtttttggtggctggccactttatttcaagtgtcaatttttaaagcaaaaacaaacattacatatttggggacattaataataatggttatagagttacttttcagattttaggggcttcccactctatcataaaaagcataaaccctttaaatctttgagtcatttaattttatgtattcttttggtatttcatttgggagttatggagtgtgaaatatgcaccatgatgagaaaacaattaaccagcacacctgttgtttatgcatattgcatttgggaaggccctgtcggagctattattatattccactgcatgctgtcaactggggggggctatcagaagtgacctgatgacaccaaattacacttatttgtgttacacgtaccgtgccttgccctgatgttggaatgatacttgctcctcaacttaaaggcatgtttgtaacccacaataacaatgagtgagattttcaggtttaatggaaaaactaaataagttcgaattcactacagaaggagggagtagtgacagaattttaagagttaacagtagcaattgccatttgagtgcttactgtgcccccaggtaaaccaggcagtttacagataattaagtgggacaccctgggtttgttctagaatatgggagaagggctgtccttttgccacttatccattaacagactgttggtagtagaaagaagttttaaaaaattcttaaaaagaaacaagttgtcattgattccttactccaactcatgctgaccccaggtgtgtcagaggtgtgtcaatataccccagagggctttcgatggctgattgttcaaaagcaggttaccaggctttcttttgaggagttctgggtggatgcaaacctccaacctttttgttagcaaccaagcatgttaactgtttacactacccagggattctgatttttgatcttaaattctgcttaaaaatttgatttggaacacacgaagccaatcacaaaaaaactgcaatttcatagttgtggtcagtactctggggctaaaggtagaggcctggggtggagagctattttgcttaagacaatggtccttaacctatcaaacctatgcctactgtaaacacatattttgtaattccttgtttaccgtcatttttttttttttaatggtactcatgtattatataatctactctacaggaagaattaacatagcaggactactattatgctttcaaagactgtttcataaggtttgtctttggctgacatctgggacctaggatttcagaagggttcctgccaccctaaatgataagagtggctcactgtgcctaaactatttgtacaaccgatgtggttttttactgaataccagctctcctactagaagtcttgaattttggtatgtgataggcagagggtgcctacataactagcccttgataaaaacccagggtactgagcctctaatgagtttccctggtagacagagtttcacacgtattgtcacaactcatttctgggtgaaaaattcacatcctgtgagactccattgggagaggacccttggaagcttgtgcctggtttccctcagacttcactctatgtacctttaaccctactttgattttgttttgtatcctttcactgtaatgaatcttagttgtgagtatgattataatctgaatcctgtgagttctagcaaatcatcgaacctgggagcagtcttggagatacctgtcacacctacaaaaattaatttcaaaaaatataatgcacaaactcacatatgaaagacaaatatgggtaagtaacttgttatagaaacatatacttttaaatctgaaaacgcccaggcattattcctctacaagacataatgaagtggtctgatgctgtatggtagaatcacacaaatgcaaaagccataagtgcaggtttcttgtgctggtgactcaagtaccatgagtgacattgcaatcaatgatgtgctttcctgaaacagtgaataattcttggcagaattatacataaagtacaatcttcccttgaagaattcctagaaaattcaggttatattaaaaccatgccccaaatacgttgcgtatatatgtaaaaaagtaagacagtgttaattctctgctcagagaatcataaacacacatgacggtgtggtggggcttgagagatagcgaggtcctgtgaggtgcaggacagtttcatacaaggcactttgtttcgcatccttgccactagtccactaaataacagtagtgcctcctaaacaccgcattggccaaaattatgtcccaaatgcctttctccagtgcagtgccaccctggttcggaaccactggcttttgagaatacattaacgagaaagcagggcttggagcaaattttagatccagcaggtagagacaatgggaattaaaatgatcaagaaagcgagttttccctggaagctgaggagaaacttaagttcagcttggtccaacaaagctttgtaagcacccacatcataattggtgctgtgcaaagtgaaaagaacttgaagcacttactaatgaagatcaaagacccttcagtatggattgcacatcaacagaaaataacaaaaatccttacaactggaccaatgagcaacatcatgataaatggagaaaagactgaagttgtcaaggatttcattttacttggatccacaatcagcacccatggaagcagcagtcaagaaatcaaaagactcattgcattggataaatctgctgcaaaggacctctttaaagtgttgaagagcaaagatgtcaccttgaagactaaggcgtgcctgacccaagccacggtatcttcaatcgcatcatatgcatgtgaaagctggacaatgaataaagaagactgaagaagaattgacgcctttgaattgtggtgttggtgaagaatattgaataagccatggactgccaaaagaacgaacaaatctgtcttggaagaagtaaaccagaatgcttcttagaggcgaggacagtgagactgtgtcttacatactttggacgtgttgtcaggaggggtcagactctggagaaggacatcatgtttggcaaagtacacggtcagcggaaaagaggaagactctcaatgaggtggattgacacagtggctgcaagaatgagttcaagcataacaatgatggtaaggatggcgcaggaccgggctgtgtttcattatgttgtgcatagggtcgctatgagtcagaactgactcaacggcacccaaaaacaatgacaaaagtgctaacagaaaaggcaagggcagacacctgggaagagaaaaggcttgtatttaggggtaaactgacactttggaggaggcttgtggcacagtggtttaagcactcggcttctaaccaaaagggtagcagtttgaacccatcagctgctctgtgggaaaagaagtggcagtctgcttccataagttctactctgtcctatggggttggtataagctggaatcaacttgacagcaacgggtttagtttttttggtttttggcactgtgtagggttgcgatgagttggaatcgagtccacagcaacggtttgtttttttttggtttatacccacataagtgctgatacaagaacaggaagaaaagaggttgcttgttatacatgaacataagaccacatggtaagggtgctaagtgtcacaggtatgtgtctttaggctgtggacagaggggatacatcgtcttataaaaataattacaactgcaagtgtttgcttgttatacatgaacataagaccacatggtaagggtgctaagtgtcacaggtatgtgtctttaggctgtggacagaggggatacatcgtcttataaaaataattacaactgcaagtgttaaaatgtctgagcacttactgcgtgtcaagcctgttccaaatccttatgtggtatttcaaccctcacggcttccttatgtggaaggtgaatatgattatttccccaatttacagatgaggcaactgaggcagagaaaggtaaaataacaggcttgaggtaaaagcctagatgcccactcccatcagtccctctcttcttcctagatgtaaccaattttatcatgtagtgtggatccgtccagaatgttttctacgcaggcaacttacggacatactcacacacacatatttttctttttaaaataaatgatagcacagtaattgtactgtgcagtaatatgcaataactgctctggatattgttctgcaacttgcttttttacataacattttagaaatgtttccacatcaggatatttagctcagtcttactccatgaggttactcattttcctgcttcgtactttttcatcacatggaagaaacattctttagttagccttttccccactgagggctattttgaccatttcttcattcttatgaacaacactgctataaacaccctaatacacatatatgtttatgtgtgcaagcatttttatagaagagataccaagaactggcatttctggggcttataatatacacacttaaaaatttgttacaaacagtcaaatgaccctctgaaaaactctaccaattgatattcaactgcagtcacttatcgcacactccagacactgagtatcaatcttttaactttttggtcaatcaaaaacattatctgattgctgttttactcgcagttgctaatgggcttgattgtttactggatatctgcaattttttgtgtgtatgtgtgtgtgattgcctcttcatatttttgattactcaaaaaaaaaattttattgtgttttaggtgaaagtttacagagcaaattagtttcccattcaacattgtacacaaagtcatggaacacttctggtgactgcggcttcttttacagctctctatttgttcaagttgtagggctaacgctttgatttttcccctttcttcttttttaatgtgtatgattatagctataagttgccctctaagtactgcttttgctgtgtcccaaaggtttggaatgttgtgttttcattcttgcttgatcccaggaatttttaaattccatctttaatttcccagtggtttctatgcaagatgttactcagttttaatgtagttggttttttttcattgctctttctgttactgatttcaatttttatagtgtgtttacggaaaatgctttgtattattttgatttttttcaaatttattaagggttgctttgtggcctaaaatgtggtctattctgggaaatgttgcatgtgtactggtaaagaatgtactttgttgttgttgggtggtatatcctgtatatgtgtatgaggtcgagttggtttattttggtatttagatcttctctatctttgctgagtttctttctagctgttctgtccttcactgaaagtagtgtgctaaagtcaccaacgaatattgtggaattgtctattttttcttttcaacggtgttagagtttgttttatgtattatggagccctgttatcgggtacatacatgtttattatggttgtatcctcttgatggattcaccctttaatcattaaataacgttcttgtcttttatggtgagttttgccttaaagtctattttggcagagattaatattgctattcctgctcttttttggttattgttttcttgacatattattttccatctcttgattttcactgtatttatatctttgtgtcgaaggtgtgtctcttgtagatagcatcctgatggctcaccttttttaaattcattctgccactctctgtctcttttctggtgcattcagtccatttacagtcagtgtgattatcaacaggtatgaattcactgttgacattttattacactttttttgtgtgtgtgtggtgttgactgttcattgttccacttaattttttgtgctgagttctttttgtctgtgaattttcttttcttttccttcatttactgagtctctgtggctttcttttttattttgattgagtaggtttgttaccccaacattcacctttgtttacctaagtttaaagcagtcttttttttcttgatattgccttgacttcctctccatatggaagttctacaatgacaccatttacttcctcttttttgttttgaagttgtcatcatttacagattggcatttctgtttccgttttcagtcttttaacattattttgtttttgagaatttgtaatctgggttggcatctagctgatgctgttatgtgtcttaatttcaggttgtagtattatgttgttggttttctcttcataggactccatttaatattttttgtaaggttggtctggtttttacaaatttccttaatttctgtttgtttgaaaatgtcctaattttgccatcatatttgagggatatttttgctagttatctaattctttattgacatttttttttccttttagggttttatatatttcattccattgccttcttgctgcatggtttctgccagcaagtccaagcttatttttattggttcccctttgtagataattttacatttttccctagctgctttcaggaggttttccttgtctttggttttagagagactgattataatatgtctcggtgattttcttttggggtctatactgtatggggttcattgcacttcttagatggatatcttcttgtttttcatgaaatcagggaagttttctgtcagcaaatctttaaatattctctctgtgctttttactgtctcttcctgttctgggattccaatcacatatagattattcctcttcatagtgtcccatgtaactcttaggctttcttcatttttcttcacttttttttttttattaacttttattgagcttcaagtgaacgtttacaaatcaagtcagtctgtcacatataagttaatatgcatcttactccttactcccacttgctctccccctaatgagtcagcccttccagtctctcctttcatgaaaactttggcagactcaaactctctctatcctcccatcccccctccagacaggcgatgccaacacagtctcaagtgtccacctgatataattagctcactcttcatcagcatctctctcccacccactgtccagtccctttcatgtctgatgaattgtcttcggggatggttcccgtcctgtgccaacacaaggtttggggaccatgaccactgggattcctctagtcacatccagaccattaagtatggtctttttatgagaatttggggtctgcatcccacttatctcctgctccctcaggggttctctattgtgctccctgtcagggcagtcatcaattgtggctgggcaccaactagttcttctgttctcaggataatgtaggtctctggttcatgtggccctctctgtctcttgggctcttagttgtcatgtgaccttggtgttcttcattctcctttgctccaggtgggttgcgaccaattgatgcatcttagatggccgcttgttagcttttaagaccccagacgcctcatttcaaagtgggatgcagaatgttttcataatagaattattttccaattgacttagaagtcctcttaaaccatggttcccaaaccccagcccttgctctgctgacctttgaagtattcagtttatcccggaaacttctttgcttttggtccagtccagtccagttgagctgaccttccatgtattcagtgttgtccttcccttcacctaaagcagttcttttcagctaattaatcagtaaaaacaccctctccctccctccctccctcccctcctcgtaaccacaaaagtatgtgttcttctcagtttatactatttctcaagatcttataatagtggtcttatacaatatttgtccttttgcctctgactgatttcgctcagcataatgccttccaggttcctccatgttatgaaatgtttcatagattcgtcactgttctttctcgatgcgtagtattccattgtgtgaatataccacaatttatttacccgttcctccgtagatggacaccttggttgcttccaactttttgctattgtaaacagagctgcaataaacatgggtgtgcatgtatctgtttgtgtgaaggctcttgtttctctagggtatattccgaggagtgggatttctggattgtatggtagttctatttctaactgtttaagataacgccagatagatttccaaagtggttgtaccattttacattcccaccagcagtgtataagagttcctatctcttcgcagcctctccaacatttattattttgtgttttttggattaacgccagccttgttggagtgagatggaatctcatcgtagttttaatctgcatttctctaatggctaatgatcgagagcattttctcatgtatctgttagctgcctgaatatcttctttagtgaagtgtgtgttcatatcctttacccacttcttgattgggttgtttgtctttttgtggttgagttttgacagaatcatgtggattttagagatcaggtgctggtcggagatgtcatagctgaaaattctttcccagtctgtaggtggtctttttactctttgttgaagtccttagatgagcataggtgtttgatttttaggagctcccagttatcgggtttctctttgtcatttttggtaatgttttgtattctgtttatgccttgtattagggcttctagggttgtccctattttttcttccatgatctttatcgttttagtctttatgtttaggtctttgatccacttggagttagtttttgtgcatggtgtgaggtatgggtcctgtttcattcttttgcaaatggatatccagttatgccagcaccatttgttaaaaagactatcttttccccaattaactgacactggtcctttgtcaaatatcagctgctcatatgtggatggatttatatctgggttctcaattctgttccattgggctatgtgcctgttgttgtaccagtaccaggctgttttgactactgtggctgtataatagcttctgaaataggtagagtgaggcctcccactttcttcttctttttcagtaatgctttgcttatccgaggcttctttcccttccatatgaaattggtgatttatttctctatcaccttaaaaaatgacattggaatttggatcggaagtgcattgtatgtatagatggcttttggtagaacagacatttttactatgttaagtcttcctatccatgagcaaggtatgtttttccacttaagtatgtccttttgaatttcttgtagtagagctttgtagttttctttgtataggtcttttacatccttggtaagatttattcctaagtattttctcttcttgggggctactgtgaatggtattgatttggttatttcctcttcggtgttctttttgttgatgtagaggaatccaagtgatttttgtatgtttattttataacctgagactctgccaaactcttctattagtttcagtagttttctggaggattccttagggttttctgtgtataagatcatgtcatctgcaaatagagataattttacttcctccttgccaatctggatgccttttatttctctgtctagcctaattgccctggctaggacttctagcacgatgttgaataagagcggtgataaagggcatccttgtctggttcccattctcaagggaaatgcttcaggttgtctccatttagagtgatattggctgttggctttgcatagatgccctttattatgttgaggaattgtccttcaattcctattttggtgagagtttttatcataaaagggtgatggactttgtcaaatgccttttctgcatcaattgataagatcatgtggtttttgtcttttgttttatttatgtgctggattacattaatggtttttctgatattaaaccagccttgcatacctagtatgaatcccactggatcgtggtgaattatttttttgatatgttgttgaattctattggctagaattttgttgaggatttttgcatctatgttcatgagggatataggtctgtaatttcctttttttgtaatgtctttacctggttttggtatcagggagatggtggcttcatagaatgagttgggtagtgttccgttattttctatgctttgaaataccttcagtagtagtggtgttaactcttctctgaaagtttggtagaactctgcagtgaagccgtccgggccagggcttttttttgttgggagttttttgattaccgtttcaatctctttttttgatatgggtctatttagttgttctacttctgaatgtgttagtttaggtaggtagtgtttttccaggaattcatccatttcttctaggtttgcaaatttgttagagtacaatttttcgtaataatctgatatgcttcttttaatttcagttgggtctgttctgatgtagtccttctcgtttcttattcgggttatttgtttcctttcctgtatttctttagtcagtctagccaatggtttatcaattttgttaattttttcaaagaaccagcttttggctttgttaattctttcaattgttttttctgttctttaattcatttagttcagctctagtttttattattttttttcttctggtgcctgatggattcttttgttgctcagtttctatttgttcaagttgtagggacagttctctgattttggctctttcttctttttgtatgtgtgcatttattgatataaattggcctctgagcactgcttttgctgtgtcccagaggttttgataggaagtattttcattctcattgcattctaagaatttccttattccctccttgatgccttctataacccagtcttttttcaggaggatattgttcagtttccaagtatttgatttcttttccctagtttttctgttattgatttctagttttattgccttgtggtctgagaagatgctttgtagtatttcgatgttttggattcattctagagaacgttccatgtgcgctagaaaaataagtatactttgcagcagttgggtggagagttctgtataagtcaatgaagtcaagttggttgactgttgtaattaggtcttccatgtctctattgagcttcttactggatgtcctgtccttctccgaaagtggtgtgttgaagtctcctactataattgtggaggtgtctatctcacttttcagttgtgttaaaatttgatttatgtatcttgcagccctgtcattgggtgcataaatatttaatatggttatgtcttcctgatcgattgtcccttttatcattatgtagtgtccttctttatcttttgtggtggatttaagtctgaagtctattttgtcagaaattaatattgctactcctcttcttttttgcttattgtttgcttgatatatttttttccatcctttgagttttagtttgtttgtgtctctaagtctgaggtgtgtctcttgtaggcagcatatagacggatcgtgtttctttatccagtccgagactctctgtctctttattggtgcatttagtccatttacattcagcgtaattatagataaataagtgtttagtgttgtcattttgatgcctttttatgtgtgttgttgacagtttcatttttccacatatttttttgtgctgagacgtttttctcagtaaattgtgagatcctcattttcgtagtgtttgactttatgttagttgagtcgttacgtttttcttggcttttatcttgagttatggagttgttatacctctttgtggttacgttattatttacccctatttttctaacttgtattgttctatattgcctcgtatcactctccatatggcagttctatgcctcctgtatttagtccctctttttgattattgtgatcttttacattttgacttcagtgattccctgttatgaacatttttttttctaattaatcttaatttgtttttgtgatttccctatttgagttgatatcaggatgttctgttttgtgaccttgtgttgtgctggtatctgatgttattggttttctgaccaaacaatatcctttagtatttctcgtagctttggtttggtttttgcaaattctctaaacttgtgtttatctgtaaatatcttaattttgccttcatatttcagagagttttgctggatatatgatccttggctggcagtttttctccttcagtgctctgtatatgtcatcccattcccttcttgcctgcatggtttctgctgagtagtctgaacttattcttattgattctcccttgaaggaaacctttcttttctccctggttgcttttaaaattttctcttcatctttggttttggcgagtttgatgataatatgtcttggtgtttttctttttggatcaatcttaaatggggttcgatgagcatcttggatagatatcctttcgtctttcatgatgtcagggaagttttctgtcagcagatcttcaactattttctctgtgttttctgtcctccctccctgttctgggactccaatcacccgcaagttatccttcttgatagagtcccacatgattcttagggtttcttcatttttttaaattattttatctgatattttttcagctatgttggtgttaattccctggtcctccagatgtcccagtctgcattctaattgctcgagtctgctcctctgacttcctattgcgttgtctaattctgtaattttattgttaatcttttggatttctgcatgctgtctctctatggattcttgcaacttattaatttttccactatgttcttgaataatctttttgaggtcttcaactgttttatcagtgtgttccttggctttttctgcagtttgtcttatttcatttctgatgtcttgaagcattctgtaaattagttttttatattctgtatctgataattccagaattgtatcttcatttgggaaagattttgattcttttgtttgggggttgtagaagctgtcatgctctgcctctttatgtggtttgatatggactgctgtctcgagccattactgggaaactagtttttccagaaaatccgctaaaaaaaaaaaatgcagtcagatccctatcagaactgcctttggattataaccaccgccttgttccctgtaaggatgaaagtctgagatttggatcatatatgcttggctgtagctggttctgtgtttttagtccaattaggggtggatttttggtccctgggttttttgtgtttccttctttcaggccggaagagtgggttacgaaaagaccaaaagaaaaaaaaaaggggcggaggggggaagcaaagccgccgcggagctggagccgttctccctctggctcaggaaattccaatgttaatgaagccgcctgactgggacgctggctccaggctctgaaaacaatcgctgcttccccgtatttgtttgttttccgtctctaaatctgtgtttgttgttcagggttcgtagattattacgtatgtgatcgattcacttgtttttctgagtctttgttgcaagagggatccgaggtagcgtctacctagtccgccatcttggccccgcctccttcacttccttttatgactgttcctcaaacaagttaatgtcaagggatttgtcctctatttcactgatttgatcttccattgcttcaattctactcttatgtccttccatggagttatcgatttctgagattttattgttaatcttttgaatttatgattgctgtttttgtatggtttctaattgtctattgtgtcattttgtttttgtattgttttcctgaattcttccagtgttttgtctgtgctttccttgattttgtgtaagtattcttcagttttgtctgtgttttcttctacctcattcttgatctcagagggctctatatataaatcttttgaacttcttatcctgtagtttggttacctcttcttactcagtgaggtttcctggttctttattttggtcctttgctcaagtcatctcgtcctgcttctttaggtgatttaatattgtctgttgtctctgaggcattaaattgttattatatttatttattaattgtatctttgctgcatgctgtttttttttttttttttttgatgtatctgggtaggtggtgctggtgtgctacgctggtcagtggtctagctgcacttgagtacttgctacttgtctccaggtgtgtctggcagcagactggatatttgagtgcagatttctgtttgctggtcttgatgggtggctagggatagtctgggttgtggttggtcgctgtctgtcattggtccagtggtgtgggagtggagagtggtccacatgcagtaggtagtgtggcaggtgtggtgggtgtgttgtgtgagtggggacatggttatcaccactcactggctgaaggaaggtgggtggtgtgtgggtacgtgcatggctgcgctgactccacctcattccaggcgaggggaaagggaagcgatgggtgggtgctggtgcagtcacatcactggcacctctcactgggcagggtgaagggggagggcatgggaggcaagcacatggatgcaccactggtatctctcactgggcaggtggaggtggatgctgtggcagactggtgtgtacgtgatcgcggcacctcttgctaggcagagggggtgggtggagatgtgagtgggtgcatgcaaggccgtgatgccagcaccactcattgggcagggggagggggcagcagaagagtgtacgattgctgtgccagtgcctcttaccaggcagaggggtgggggggtgggaggaggacacgcagggtcatgccacctgggcctctcactggatggggagaagggtgggagggaacagtgggtgcacacacggactcaccactggtgtctctcgctggatggggggaggggagagggaacaccaagcaggcatgcacacagtcatgcttctgccgcctgtcaccaggttgggctgggcactggtataggacaggcatgtggacgggtgtgtgcagtctccactgctctgtgagtcttgggcaaggtgtaggtggtggggaggtgcacacactgagggtgcctactgctgttcataaagtgcgcaaagggggtggtagatgggactgggtgggtggggagggggcctgtgttatggtctccagtagacagggtattgggtatagggctccccaatacttctgatcaccagggaaggggtagaggaagtgcactcctctggttagcagatatgggtgcctaagccatttatgtctattgcagccagctgttcggacctgctcgtgaccaagtgtgagaagtgggggacatccagggtccatccggtaggagatctcccattgccacttcacatttccactgcctcaagcgtgccacttacccccaaggtcaaggactgttgcttgtgggtgtctggttctggaacttggctctctgcctgctcttccttctctcccagtatgtctatatagtttctctgtctcttatgggactgctgaggggttgcctccatgtgttcctcccccagggtcacttctagcattgccctaagatggccacattgagctgagggggtttgtagagcttttctgtttcatgttatttcttgcttgctgtgtttgttcaatttttcttttcagtcagtgttcgattcacttcttcatccttcctttttgatgttcaaaattccaggattattgtctgcaatggtttcacttagtttttcaggtctttgctgtaaggggatggtaaagtgtgtctgactagtctgccatcttggctccctgataatttttattgagttgtttgtcctcattggtttgtaagggctctgtactacagaatgtattaatactgggattttttttccctccctgttgtttgtgttttaactttactcatggtgtcctctataatagattttcattggttttgttttgttttgcatttaaatctattcattgtttcctttatagcttttgggttttgtatcttgttttggaatactttacccaccaaaagattataaaatcattctgatatcttttttatatttaatattttattccattaaaaatttatttctgcttatgctattagacctataactttaattaaaaaataatttattaatgtctatcattttctatgttaatttaaaaataacatgcctatcatagcaaaactcctctttaaacactgcttctaaaaatacttcttggtttccttgattatttttctacgtttgagcccataccttgctgccttaattgcagctttataatctattttgaaatttggagggcaagtcccccctcctgcttttgttttcaaaaatattctgccagttcttgtcaaaatctgtaaaattgcctgatgggattttgatttaatttacttcaattttgggaaataatattgttatctttacattgttgagcattcctaccatgagtgctgtatccttccatagcatattctctcttttgtccttcagtaaaattttccagttgcccttacatataatttgtatagctcttgaataggtattttatgctggcgctgttgttactattaaggcactttctccaatatatttttttattagtaattgctgatatgcagaaataatctacacttttttttgtatttttatatcacatattagagaactttcttatttctttcaaaagttttctagtaacttccttgaactttatagataacattattcagaaataatgacagtgatgtgtcattttttctaatacatatgcctctatttttttttgcttttcttattgcattgaccagtaattaaatagtagcaatagagataaacatatttgtattatttatgattttaatacaaatgcttctatactttaacactaaaaatgatatctgctctaggattctaatagatacctgctatcaagtatcttctagcttgctaagattttcttttttaaatcaggtaatatgtgatttctggcagccattgagatgatcatatggattttttccctaattatttatgtagaggattatactaatagaatcattaaagctgaaccttccttgtgctactggaataaactttgtttggtaataattcgttgtaactgtgaatacatcattggattttttattctttttttttaaaagaatatattggctgttatgagaactgcattgccggaaggaagaaggagagtgcttatcagccaggagctggcagtctcacatgccagtaattttattcatattacaagatgttctttaatactgggtatatccaaggacatattgcattggttaaatctgttgtaaaagatctctttaaagtattaaaagcaaagaggtcactttgaggagtaaggtgcacctggcccaaactatggtcttttcaattgcttcatatgcatacgaaagctggacaatgaaaaaagatgacagaaaaagaatggatgcatttgaattgcggtgctggcaaagaatattcaatgtaccatgggctacagaacagacagaccagtcttagaaaaaatacaaacagcgtgctccttagaagcaaggacggtgagacattggctttcttactttggacacatcattgggaaagaccatttattagaaaaggacatcaagtgtcgtaaagcagaggagacggtcagcaaaaatgagaaaaactcttgatgagatggattgacacagtaactgcaacgctgaactaaaacgtaacgatgaccatggagatggtacagcgctgtgtgtactgggtcttcacgagtcagaactggcttaacagcaacaaacaacaacattcccaaggagtcctctcccatcagtcccacctgttcccagaattgctttgtgatctacaaaagagggtggaccttttactcacaatcatttaaatttgaaaaagcaaccataccgtatgtttaaaaagaggtcaaatatatatttgaaaacaagaagagccacagaatctgataagaacaaaggagagattgacaatgaagtctataaaggtattgttatggattgaattgtgtcccctcaaaatttatgttgaagtcctagtccctggtaactatgaatgtaatcttgtttggaaatagggtcttagaagatcttatcagttaacatgcggtcatactggagtaggctgggtcctaatccaacttaagtgatacgccataaaagaagaccagagacagactatcaggaagactgccatgtgacaacagagttatgctgcagttgcaagtcatggaatgcctgcggctaccagaagccagagagacaagaaaggatcttcccttagagcctttggtgagaacttggccctgctgataccctgaattcagaccactagcctcccaagctatgagaagataaatttctgttcctataagccacccaactgggggcactttgttacagcagccctaggaaactaatacaggtatcacagtagttgtacaagcgagaaaatattaagccattttgttttgtttttggaaaccctcatggtgtagtagttaagtgctacagctgctaaccaaaagatcagcagttcaaatacaccaggtgttccctggaaactctatggggcagttctactctgttctatagggtcactatgaatcagaatcaacctgatggcaactgatttgggtttttttgttgttgttgttctgtttttagttcatttcttgaacttgtagaacacatgataaaattctgctgattaaggaggggggtgacttaattccccacatatccttggtaagctttatcgtatgtttattatagatatttatcctccacattgcaaatatatttttcaactctattgtttgctactgcctttgctaacagtacttttttaaccgtacaaatttttaaaattttttctagaatcaaatacacttactcttcttttatcagattttctttttaattaagaaggactcccccactaggccttattcctaaattatctgtgtggtctcctcatattattttgtagtatctacttttttatatttaaatctttaatccacataaaaatatacacacacatatatacatatatgcgtatatatatacccacaggattcctggtggcatagtggttaagagtttggctgctaaccaaaaggtcggcagtccaaatccaccagccactccttggaaaccctgtgggatggctctacagtgtcctgtagggtcgctatgagtcagaattgactccaggacaactagtttatatgtatacacaaggagtcctgatggcaaaatagccaagtgtttggctgataattgaaaagttggtagttagaacgcaccaactgctcggtgggagaaaagacttggcgatttgctcctgtaaagattaccgtctgggaagccctgtagggcatttctactctatcacatagggttgctatgtgccttggtcatctagtgctgctataccagaaatacaagtgggtggcttcaacaaagagaaatttattctctcacagtttagtaggcttgaagtccaaattcagggcaccagctccaggggaaggctttctctctctgttgaatctggaggaaggtccatgtcatcaatctttccttgacctaggagcttctctatgcagaaacctcaggtccaaaagacaggctctgctcccaatactgctttcttggtggtatgaggtcctcatgtctctctgcttacttctctcttttatatcccaaaagagataggcttaaggcactacctactcttgtagatctcatcaatataactgccactaatccatctcattacatcatagtgataggatttacaacacacagggaaatcacatctgatgacaaaatggtagacactcatagaaatcttggaatcatggcctagccaagttgacagatattttggggggacactataagttggaatcgatttgatggcacacaacatatatacatatgtatatacacatgtatacatataaactttctatttattaatttcagcttttattgttaattatctcctttatgtattttcttttggctattttgttgtacttttcctaatgttttcaaatcagtattaagtcactttattaatcttctttattttctagtagtgaagacatttaaagatctccaatttccattttttttacattccacatgaaatttctgcttttactgtaacccacagattttggcacgaagtacagtcagctctctgtatccacgggttctgtgttcatggattcaaccaaatgctgattgaaaatattcaaggaaaaaaaaaagattttcttctcttgtcattattccctaaataatgcagagtaacaactatttacacagcatttacactgtataggattgctaagaggtgaaatcgactcaagggcaactggtttggttttatgtataaatgatttaaagtatacaggtggctatgcgttttttttgtgtaggttataggcaaatactatgccattttatataagtgacctgagcatctgaggattttggtatccacgtggggtcccagaaactatcctcggcggatagccacagatgactgtatactcctttacaaagctttgtagatagcttataacgtcacagctgttattcccttcgatccaaagactcgtataggaatatattttgtaattttcaagcagtcataagactttttggtcactttccattatttattgctaatcttaatagcttattatcagagaactggcctgtaaaatgcacacattttaagattttctgtgcggctaaggcataattgatttttctaaatgttcgacagacatatgaaaataatggatatgccttactgaagcaatgtagggtttgtatatagctattaaatcatgtttattgattgtattattcatttctttatgtctctgcctattatttggctatcaaagccatccaattctgagagaatctacatctttgtgtagtgaagcctctttctgtaattgtattttttctcattcagttctccttgcatttatgttctctacacatttaaacttttattttgtgtatttagctgttgtggtagttggtgcatatgattttatgaatgtcaacttttcactcatgccttgtaattttttttcttcattatctaatgtccctctttattccgtttaaggtttttgcttaaattccactttatctatcgtttgcattttcacgtatctctttactcatacctttattttccacctttctttaccactataaatatatttttaaccacttttttttttataaatatgtatattcttaccatatatacagtttaccactgagttttattcaaaatctaatttggcaatctctgaattggcttttgactactatctaacttatttatcttcctatcagtacacttttagtgtaacattgattgacttgatcttattccttagatctcccatttattttatgttattgtttcatctctttccatttctatatttttgctggtttaattaagttgctatttgtttcattttttccattgtcagcttcaaagctctgtattttgactcataatcatacacacattttgagaagtcatgatactaactacttcccctgctgacacacactgcttcttcatgcttgttctcctccagcctcataaattaagacctttagagtattttcatctttttctttttccttttcccttccttgagctctctccaacacatccttttactccctgctccccctttgctactcccagcctcagggttttactgaaggcagtttaaaacattttaagaactagactaacagaatttcccttgtaatatgtgccttctgtttcaagagtccttatgaaccacatatatcacacattctcgtaagtctatcgttataacttgatgggtccttgagcatgtatatagcatgtctatacattcttctcaatacagatacaatttcttaccattggtattattatttggattcgttctcattttaaataacacatttttcactatataagtaatatataaataaagtcttcctgtaaagaattcaaactctacaagaaataaatagcctcccttgtccatcactcatcctattcttcttctccttagaggttctcaatttagtgtatgttttctagaatattttccatgcatttatatctatatatacacacacaggcacacactgaacattgttttgcttttgtgtttgaatctgtgtttaatataaatgatatctggttgcttgtattacttcacaacctgattttcccatttaatatctcttcaagctcattctaggtcaataaatatagtttaacttgattcttttaaactgttgcataacaatgcatagcatgggtatagcataattttttgacggacatttaggttgtttctattaatttgctattgtcagcggtggataaaccttacacatgtctcctgcacatgaactgagatgagtaaatgtggatacacggaattgctcaatcaaagcctagatgctgttgctactaaactgccacccaacacttgctctacttatttataattctaccagcaaggcatgagatttacattttcaacagcagtgcataagattatttgtcttgtctttctctacccttgacagcacttaatatattatcacaattttatttatgccagtctgttgagtgaacaactgtatctcattgtgttttaatttgctgattagtaggaattttgagcattttttcataagtttattagtcttttgtatttcctgtcaattgcatttctactctttgtcttcctactccattcctgtctaacttataactaatttattattccaattcttaggcattatatactctagattttatcctttactgttatgtatgttgaaatattttctcccagtgtcttgtttatctttacctatgtttatggggtcatcatgacttggagttgagttgatggcaactgttttttggggtgtttatagagtatttggtcaatcaaaatttcaaattttgatgtcaaatttaagtatcatttcctttatgtcttcttggttttatgccttgtttcaaaaaacatccaatatattaagattttaaaaactaatcttccatattttctccaatatttatatatttttcatacaattgaatattaaccatttgaaatttatatttctttgtggtgaggtagaatctaattattattattattttcaaatggattgccaaatgtcatccagccatttctgcatagttcatcttcctctgcttccatttttatcataaaatagattcccatataaaataggcctgtatttggacttctcacccattaatatatttatctcttcttggttcaaatccatattgctctaactattacagttttatagtatgtttggaagtatcacagggtaattttccaccccacatttctgtatagttctttattttcaaaactatcttggctattgaagaatgcttgttcaaccatccccctccccccaccaggtgtattgtatcatcagcttaacaagttccatagaaaaattctattggatactgattgcagatgcatccaacttcagcttggttctgggaaaattaacatttttataacactgacttttcttatctcatgaatacagtatttactttcacttactcatttcttcccttcttttattgttaaaaatttgcagtttcatgcacatttcttattacatttattgctaggtagttcatttcttatttatactacaaatggaatctttttttcaattacattttccagttggttgttgctgaaatgtgagaaacttacttgccttcgtatgttgttcttatatcaggctaccttggtgaacttattagctttgaggaagagcttttcaaaactaaagctctttgcgtgactagaacctctgactggagtctgagtcaaatcctttcctgtcctaagcgattccatcttagatttcttctctgtcatgtaacgcagcttgtcatttctgcaaagctttccgctgtactctgacctagataaataagattctgcccaccctactctgctagaggaagaatttgcagttagaaatggccgacgttaggaagagagaattcaagatctatactgatgttaggagaacttttaagcatatggctttaagtggttggtcagttctcagaaaattcccccttcgccctcccttgaaaaaatgtttttgtaacctgtgtctgggtccttacaaagccctgtacttttttccataaccttgttcagcctacccgaggaggaacctaacccgccttaaactgataattgttgtgtgccgttgagtcgattccaactcatagcaaccctatagatcctataggacagagtagaactgccccatagcgtttccaaggagcagctggtggatttaaactgctaagcttttggttaacagcctgagctcttaaccactgcgccaccagggctaactaatcttacaaagttatagcttttctgtatcaaaaccttttcttctcccttgagcataagaatttttagcatttttatttgttaccgtttttatttttttcagcatactcttcgctttcacattttagcagactcctccagtgcaatgcagatctaactccattattgttttcttgaccattactcagaagacgttttggctttgctaacctcagaacctgagctacagacatctaggtgccaggaaacatgtgattgtgagtggtcagccaagatcctgtcacctggagccatccttgcaagagaggtcaacccctgcaagggtggtcagccaagcagcagccattggcaactttgtaaatgttaacaaagtcgttttagctgtacttcctctttgtgggttttttcttcataaatctctgtattactgcagccacctcccaccccccagagtacattgttggatttcccctagcaccatcttcccattttgcagaatgccttctttgccataataaaactcgttatttgtaggtttaaacggactattggtttattccactactacagctttcaaagtttcagaaattcttcaatatttctttcttgttaatgacagcctttttcttttccagcaataagcgtttaatttaatgtaacagtttaaagtttcagaattgggattcaaatctcggtgtccaaggtctaattctcccttctttttattatttcaagctgagtcttaacattcaatgagctcccttaaaaaaaaaataaaataaaattcttatccttttttctaagcacaaaccaggctataatggagtggatacctgtcaccttgctcagtccttcatttcaccaactgagacctaaaaaaatttaagtgacttgtctgaggtcatatgagttagacccaaaatgtggcatacttggagtaccttcaagagcggttaatacaatttctaacctatatacgggaataacagtgccttaacggttttattctacaaattgcatatgattctaaccacacagctttatccattttattgttccatggaatgatttgtgcagtatttatgaatgtgtgtgacatgggtaaatttccatgccatgcaaacattgttttcaactgtatacttttaaagaatagcaagtgtgtcatatttatactataacagtatacaaagtggttggaagcaattatcaaaatgcttgagaattcttaccaggatgtcaatgaaaaattattaaatcccaaaagtgcatttagcattttgagaaatgagaatgaaacccaagaaataagataaaatgctcatagagaaataatataaatacataggtattaatggtagcttggagccctggtggtgcagtggttaagcgttcagccactaaccaaaggttggcagtttgaatctaccagccactccttggaaaacctatggggcagttctactctgtcctataggttgctatgagtcggaattgactcgtcggcaactggtttggttttttggaatggtagcctaatacattatactaagtagtttacatatgttaactcacttaactgtacaacacacacatggaaggacaacaaccatggatttgttacctcctttcacagagaagttaactcatattaaagcaataactacaacaacaacaaagaacagttgtctttgagccaattctgactcatggtgaccccatgtgcgtcagaggagaactgcgcttcatacagttttcaatggctggattttttttggatgtagttcaccaagcctttcttccgaggcacctctgggtgaactcgaacctccaaccttttggttagcagccttaaccatatacgctactcagggactccgaagtgaagtttagagaaatgaaattacttgcctaaagtcacaaaatcagtcagtagtaaaaactgactttgaacacaggggtatttaacccagaagcccttcttcttactttttcctttatgttattttccttagaacccatctaggcagccaagatacacgcattccctcccatctggcaacactgcacaagcacaccaagccctgtgatgtcctttctagctattaactgagacacaaatgcatcaaaggccgagaagctgctcacataacctactgaacattttacacgaatgccttcaaggaagtacgcatgacacacatcaaaaacccaaacgtagcttagtgaacaatcactcgtggtaatacactcagatgcacaaggggcatgcatgaacatcttaaatgttcttttttgataaggaattaacgtgtgaattattccttcctttttgcaatggacatgacggtgtaacgagaggacaattttgcatctcaagcaccagcctgcagatcaccactttcatggcagcttgcgttgtttttatggcaaattgtgctgtggcattcatggcaatggcaatttgtactcatatcattatgagatctttacattaattcaaggaacgacctcaaatatgacaaggaatatgagcaggccttattggaaaacatctgtatgcatctaatatcagaaaatgcacagcattttatttggaagttctgaatttcttcacaacataaaactggccatgagatataccgcttatgcaatatgatccctgtgacacgatccttatcctctcctattcaatatttagctatctgtaaagtagggaggaaaagccaaaaacaacgccttctcttaggttgacttgtactctgaatttataaaggtatgcattcagggacccagcacacttggtaaggattccaaaacaagcctgaggggaagaacgatacaataggaagtagtaagcgtaatataaatgagtaaaaggtaaaaggacagtggcgatatggatcatcgtcgtggattaaatcttaaattaggattaatattttaattaaggaagtcaataggaggtcttctctgaaacttttaaaattataagtaaaattttctctgtatttatatggttttctggagagaagacccattatcttttcagattctcaaaggttcctgtaatccagccaactcccactctgagataaccaccagatttgattaaaaaaaaaaaaaaaaaaactcagtgctgtcgagtcgattctgactcaaagcgaccctatagaccagattagatagatagtttaattcagggtaattccaactcattcaactccaggatatttcacacacattttcttgcttaaacattcactctgagttattcaactaaaagcccataaggatctgttgttgttattgttgctgggtgctgagaagtgggttccaactcatagtgaccctatgtacaacagaatgaaacactgcctggccccgtcccatcctcacagttgtagttatgctcgagcccattgtttcagccactgtgtcaatccatctcattgagggtcttcctctttttcgctgaccctctactttaccaaggacaggggctggttcctccagataacatgtccaagatacatgagatgaagtctcaccatcttgcttctaaggagcatcctggctgtacttcttccaagacagatttgtgcattcttcgagcagttgatgttgtattcaatattcttcaccaacacccaattcaaaggcatcaattctcgtttggttttccttcttcatggtccagcttttgtatgcatatgaggcaactgaaaacaccatggcttgggtcaggcacaccttagtcctcaaagttgttaattgtttgataatttccacattagaaggatcaatttggagctaaatatctccagagaatcctcagaaatacaaatccctaggaaaatccagccaaaataatggcaatagtgatgaggaactgatttaatacagcatattttgggtgtaatacctctggaccccagaggaagccaagaaacctcctaggaagagaaaagaactacagcatctgtttagtgtttactacgtggcagtcattgtattgggcacgttagactcatttccattgctttgtttgttcatctgagaaaattaaggttcgagggatttttaggaacctgctcaaggtcatccaaccaaaatgtggtctgaggacttgaatccaagactgactggatctcggtggtctttctgctactccacacagtgatgtcttctttcctcctgtctccccagtcctctcaaacctgccttgttggtgttcaatcggcccactccatctacacctttctcgaaagttgccaattaggctgaaagtacatttcttaagctaagttctccctcttccttgattcagatgcattatcccttggcataatagaagaggcacaagctgggagacaggagccctagctgttagtcaccacttgtctgaacaaaccaggtgacctcgtatcaatctcagtgccagtctcacctttgataacaaggggttaggttacgtgatctctgaagctcatgtataatatcttctgactctattattccttggtgtaaacacgtttctagggaaaatgatctgatcatgttcctaggctatcaggttcatgtacttattgagggaaatatctattatgcctacaatagagttgtctttaactcaggttcttagaatactgatcagatggatgtaacttgatttgtccaaattgtagcacatggccaagtccaaacagacccttctgtgccttttagttggctgatgcagtgagtgtcactgcaataccctttctttacataggcctggggaaagtgttggaggtgacggccagaggggagggcctaagcagacagtgggtacttacaacagaaagctgtgaccaggaaaagagccctggctaagaagcagcagactctatttgtaaaaatgcaataatactccaggtttatggtggaaatttagtgagacgactcgtgcctgctaatgaggtatggaaatgacctcaaagctttattaatgtatgttgttctttagctgctgacacgtcgagtcagctctgactcatagtgaccccatgcacaagggacttggactgttgtgatccatagggttttcattggctgatttttggaagtgggtttccagacctttctttctagtctgtcttagtctagaagcttcgctgaaacctgttcagtatcactgcaacacgcaaggctccactgacagatgggtggtggctgtgcacgaggtgcactggccaggaatggaacccaggtctcctacggggaaggtgagcattcttccaatgaaccaccactgccccctcattaattgcaccagcagattctatgtggaaagctgcagttctggccatcgctgggcctcaccccagccacttacagaaatatactctggggcctcaataaagcaaatctaaggcgacagcaccacgtggcccgcttctctacagagatggccatgcacatccttgcctgctcctttactttcctttaccttatgggtacatctctccggatccttctgtcctcctaccagtcctgtgacgtatggctgtgcgccctgggaggctgtgtgacgtgcccacttggcctgtcttaggcaccagcgagtcagggttagactgcacaacacagtctgtaccataccgtgtggcatcctcattctagcaatatgtgctgcaggcccagagcaggaggatgggctgactttgggactacgaggaaaaatcaggcattattctagatcttcattatgagacacagggtgatagtgattgacagggctgaccccggtaagggataccagctgctttaaaggcagaaaaggctcctagaactcaattgcatgaagatggccttttgaagcaggagactcgggaacatttcccaggtctccaaacctcgagatggcaccctccaggcctcatgatagacacacgacctgtctgaggattcccatcaggtcttgaaaatttaacctgggcctgtgtgtatgtatatgtggagaatatcgttttgcccttgaagccaaactcagctgccctggtgcagccaggtgcaagctataaatcaactgtattaggatatgacagcaacttgccctgggaatatttatctccgtccctgtggttggtgtggaggctactgtgagctgaatcccagcaactgcagtgggtcagtgtcatggattgaattatgtcccctcaaaaacgtgtattgatttggctaggccatgattcccagtgttgtgtgattgtctaccattttgtcatctgatgtgattttcctatgtgttgtaaatactataactatgatgttaacgagatggattaacagcagttatggtgatgagatctactagtgtcttaagccaatctcttctgagatacaaaagagagaagcaaggagagagacatagggacctcataccaccaagaaggcaatgcccagagcagagtgcatcctttggacctggggttcccatgcagagaagctcctagtctaggggaaggttgatgagaaggactttcctccagagctgacagagagagaaagccttcccctggtgctgatgccctgaatttggacttggaacctattagactgtgagaaaataaatttctctttgttaaagccatccacttgtggtatttctgttatagcagcactagatgactgacacagtcaggcatagctgaaggtcagtcccacttttctccagggtctgataacccaagcatcactgggcttcagacctgcctgaagcctaacctcatggagacgcaccctattctgggtgatgtctgctgagagatcctggatgcttctctttgtctccttggtgtaaaccctaccctcctctcccctctctgatccacgtagccaggactgagaacttcaaagacatgcttcttcacaggcagcctgacaggttaaagacttggtccgcagctctcctggatggcagcagcagattgcgagtcactgcccggtttcagaaagcggctctgggtgtgtcagagtaactctcaaacaagtgcaccctcgtggtaacagaggggatagaacaaagccagaattgcttttcactcctggaaacgctagtgtttcatgtcagagtttggcttacttaatcttttcaagccaggaataagatttcccaggtgtgacattcactgatagcagtggacattccgcaatgccgagtgccaagaaattaatgctccaatctgcataatcaaatccccaggtaagcatcaccattcctttctgagtactttctgtcccttgcatttccaaatctttacatttattcaaaattcaagaaaatgtaaggcttaatagcaatttttactgggaaatttttaaggttactatgacaaacacttattgcatgaaatttactaagtccaagataatccagttttcctatatgtttgaagtatgaaaaaatatatatggcctgaatatctcatgctacatggtgcgtttcctgaatttacatttcaatcacttcatctattgcgatatagtgttgattcacgtcgagttttgaacattcatttaatgctaaaatccttaaaacgaaccttagacacagagggttcttcatttttcattagatttcttaagtcagattaactagattcatcctcaggtaaaaaggctggagagaattgttggtgaaggtcacagcagagaattcaacgagcaggacactctgctgaggtttttgcttttctatggagctcagtgagttaatctgacatttcctgaagcacttcggagggccaaacgagacagaattaggttaagacaacttcataattttataaaaaaaaaaattatagctgtgattaaaactaggacctgggatttatctggatatagatcccagtattaagcctggtattgagtttagtccatggagtgctttttggaaccttgttaacctaacaaactcctattcatccttcaaagtccagtttagctgtcgccacctcctggaagacttccttgataactcagtctatgaggagtaaatcctttgcacaagccaggtggttatatttttctccattcctcagaacaaacccccccccccactgaggcctgatgtttgttaacaagattaaaaagatacaattctgggctatccaccctccccctcctcaggaagtaggggaaagtgatgcagtaggatgtttgctagcagtattaaaaagatacaattagtcactttggtttgggggtataaaacagctgggagaggaagttttgagtctcctcagctgtggtacagatggggcacaggggacaaaagcttagagtccacctaagtggacctacctggccagggggagactggcagcaggtagggtcccatttaagtcccttacccatggcacaaagtgagatgtgcaagggagagtcatcatctctgcccagacagcttttgagaaggaacttcttatgatgggacttttccagttgaatgctgtctgaacattgtaagtaataaaagctactttctatgtgctaaggtgcattcaggctctgattggaaggatgtgatgtttatggaacaatccatattaattattggtgccctttttctaatggtctcctggctgtctagaaatcgggtacgacctgtgagcaccacgcggatgtggagtgtggtcttagagttatggcgtagctgagcagggcgtgttgtcttacagaggcaatctctctttcctctgataacctctgctggtaaacgtttttgttgcatttaccattctactttaattacttgttcatatatctctctccttattaaatcatgactcctggaggtctgagattgtgtcttatctctgtgttcccaggaaccagcacggtactaagcatacagtagttgctcaatgaattcttgctgaaaaaaatgaatgaagccatattgtctggctgtatcatgaatctgattgagaagcctggtgtcctcatgctctgagcatgtgcacattttaacttaaaacccactatcagcagagcaaaggaagcaaagtggttttcaggtcagatctggctgtcaagtcgccccctgactcatggtgaccttatgcacaacagcattggaccactgtgatccatagggttttcattggctgatttttggaagtagatctccaggttttcttcctagtctgtcttagtttagaagctctgctgaaatccgttaggcatcacagcaatacacgagcttccactgacagatgggtagtggctgtgcatgagatgcaccgcctgggaatcgaaccctggtttctcgcatggaaggcgagaattctaccactgaacccccactgccctctctacctaaaatacacctatgcatctgtcaaggcttacactgaggcattgcttcctcaggtaggccttccccaagcccttcttcaagctgggttaggtcccctgccctgcgtctgtagtgtcccacatgcctctcaccaccatggctctgttctccagcctcacttgtggatcacaggcccttgaggcaaagtctcttcccaccgtaccccggcactaacattttggggttgcaaagttgttaactgaatgaagaggagcaacggggtgaggcatagaggtggattctcattctgaacaggggaatgagacacaaaatggagcagctgaaggaaaacctatgtcgtgctctgtagagcgaaagcatttctgcttggctagagtaaagactttgcgtcaggaaagaaagaaaaacgatactgtcgaaggtgaagcaagtatagagagggctggaaagcatgactaaagggggaatcacttcttgcaataaccctgaagattttgcctcatcttctctgctgcttgcacttgatcccaaaccagcctcgtgcggtgcatctcatcatcggaaggcctgccagacaggtgtcctgtgatctttccaagtgccccttacttctcagagaggccacttcttcattcttacaagttaatactcttcctggggcttactgcatgagatggaatccctgctgccattctccgtatgttctcacatccgacagatgcccatcatgaagccaccaaagtcctctgatgatgtaagttgacagtttccccaccagtgggtactgtgccacctgggccctggcatgactcagcacctctgaagcatccccaggctgctccccctggtgccctgtgggtctatctacattatgccaggctggtagagctgggcctaggctgcttccatggctgccacaacaagagcccagggacagagctaatcaattccagaaacgtgtaagagcaagcttatatcctagcagtgtgggaagccaggcagcagctctaagtgtgtgtggactttcttgcctcttctgttgactccttcttagcctatagctcaagggaggccctgatccatcagaaggaaagcttccaccaccagaactgaagaaccttcgcctgtcctttaccaactcccttccttactcacccactcctctcttattattctaatgccctcccagggatttcttctttctttcaacttctcacctcacttcaactctatagagtataaagtacttaagaggcaggtatgtgtagacctttgtgagtgtgtggtaagtatacacacgcagtgcccgggttacagacgagatccgttcctaaaaagatccgttcctaagtgtgtctaaatcgaattcgcaggttaggtcgaaacaggtgcatatggttcttatttcgccttaatttagtgcaagaaaaggcttgaagccttttcaatgatttaaaagctgcatttgtggcaagtgaaggtgactgtgacgaaggattgttgtgagtaagggctggcttaatcatttcaatctgcaggcaaatttacataacattaaagggcaagtacgagttgtctgtaaatcggacatttataacccagggacttattgtatataaaaaccactacccacccgtcagtttgccatactgcgatggcttgcatgttgctacgctgctggaagctatggcattggtatttcaaataccagcagagccatccatggtggagaggtttcagcggagcatctagattaagacagatgaggaagaaaggcctggcaatttacttctaacaatctggcaacgaaaaccttacggatcgtaacagaacactgcctgatgtagtgctcaaggatgacatgggaccagagctgactagacggcaactaataacatttataatgaaacatttgtatttcaacatttttacacgtacaattcagtgacattatgttcaccatgttgcacaaccatcgccgctatctgcttccaaatttgtccatcacccttaagcaacgatgcatagatcttttaaaaagcaaaatatacacatttaaaaatgtttaatatagctggcattttcaagtttctctgaatgatcaaatattctacagaagacactttggtgttgttcagtcgatcggtcaggtctgtgtggctgtgttcactatgcaatgacacgttttaatgcagcaaaaagtgtattttggcccccaaaaatctgctcttcacaaataaatgaaagaattataaaaatatgaattggacatctaccgagctaggtacaggggctgacacaagagatacacacaaatgcacaaaagaaagcatggtcatctcgccaagaagattaacaatcgtgctgaggttaagaaacccacgcaaaattacatttcagaaaaaaaaatgtcattaagtgttacggggcatcggtggttcagtggtagaattctcgccttccatgcaagagacctgggttgaagtcccagccaatgcacctcatgtgcagtcaccacccatctgacagtagaggtttgtgtgttgctgtgatgtgcagcagggctcagtggagtttccagactaagagtaggaagaaaggcctggtgatctaaatcctaaaatcaaccaatgaaaacccaatggatcacaaagatctgatctgtaactgatcacagggatggcataggaccaggtagtgttttgttctgctgtgcatggggttgccatgagtaaggggccaagtctgtggtagttaaaaacaacaattaagtgttaagccttcagcaagtttgcattgaatatctattataaacagtgatagtgtctgtggcagggtgaaaagcagcactgagcacagttcttgacttcagggagattactatatggttgagatgaaaatgaacaagaaatccctagtcattgggggttgcactgtcactgccatgaatggctaggcttccatcccctacaggacaatgagctgatcagttacgtgccagatcactgatgctacatgaactccaacaaggggaaggcaatgagggtgctatggccttaaaggcccctgagaggtgctggccttggcttggatctcagagagtgggattcattgcttgtggactggcgcagaagtgagtgtgttgtgtcctgccaagtcagatgatggatagatgggacattctgaaaataaaaacacaggagggaaaaaaaagaaaaaaaaaaaaatccaaagaacaagtagaattttaaaagcctctcatgtcaactgaagtaataatataaaacaaaacaatagcaaaaaaataaaatggccagcactataggcagtcacagcaaatgtttacaccttggttccaagctgtcaggtcctcagctgtttgtgtgagtaacctacactgtaacgtccttctttctatcttggccttagcatatggctactaggacccttttaaatatcagataaaaaaagaaaaaactgtgctaggctgaaaatacggagaagaatgtcacacgaggatgatgatgacacaggtgtccaacacaagactaaggcagaactcctcggtgctacaaatcaagagcctttcagcaacgtgtaaatgtggtgggctctgtattgtgatttctcggcagaagccctcttatccctgttgatcagaggttggtcagttaatgaaaacgtcagttagggtggggaattgaaaatgtccctcacggccatccctgctcctgcagagcttacttgtacagaggtgaaggggagggctctggaagctgatctccgtgcacatctgggctctgtcagttaccagctgggtgacctgccatgcataagtgtccccatttgtaatgatagctcctacctcttagggttataatggagattaaattcatgaatactgtagaggctgtagagtactatcttaaacgggaagcagtatgtaagtactggttaaataagagcactcgaggtaggcccaaggctgctgctttgcctacagatcctattattggactcatccattgtcttttatttatttattttttcatgaaacacatgctttatacattgtctaagatttccaggtttgttctttttttcttaatagtggaacaagaacttaaaaccacttgagaagtaattcatatgcagaatacccctacttttgattcaatccttcacctcccacaattctttagttagatgcttttatctaatttgatcacaaacattttcagtgagttgcctttatagaagcttttgaggcactcaactttgttttatagaaacaattttctttttgcaccataattcatgggtttacgtaagttaaaaattacataataaccaggacagcactaagcacataaacatatcaagttacaaacataactcactcttggtaagcattcaattcaaccagtaagagaaatactgtatttttaggtgatatgcacgttgcacatttttgcaaactgcacaacctccactcgttattttcgtaagctcactatgccaatgtttttttatgtgttactgacttcaattttaatttttttttctctgtccagtggatttaatgtcaccaggataaaactgatctcatggaaacttcatttaaggtaggtatcttcctaaaccaagtgcaactgatgatgaactgaatgggctggtgatagaaatgggacgccatgttgaaaccaaagagtatgaatgcacgaagcgctagaaattagtaagtaagaaatgatcctagtctggcggctaacagatacatgagaaattgctcgcgatcattagctattagagaaattcaaatcaaaactacaatgagataccatctcactccaacattactggcactaaaaaataaaacagaaaataacaaatgtcggagaggttgtagacagattggaactcttacgcactggtggtgggagtgtagaatagtacaaccaccacagaaaatgaaatggtgcctccttaaaaagcttgaaacaggaatactgtacgatccagtgatcccactcctaggaatttatcctggagaaataagagccatcacgtgactagacgtgttcactgaagcattattcacaatagcaaaacgatggaaacaacctaagtgcccatcaatagatgaatggataaacaaattatggtacacagacatgatggaatactaggcaacataaagaacaatgatgaatccacaaaaatctcacaacatgcatgaatttggagggcattacgctgagtgaaataagtcaatcacaaaaggatatagattgtaggagaccactattataaaaaaaccaagaaaaggtttacacacagaaaaaaaaaacaaaacactttgatggttaggagaaagggtaggggcaggaaggagaaatcactaactaaataggagacgagttaactttggtgaagaaaacagacaacacacaatatagatgaagtcagcacaatttgaccaaggcaaaagtcatagaagcttcctagacatatccaaacacctgagggaccaaggtactggggctgagggctggggatcatggtctcaggggacatctaggtcacttggcataatgtagttcacgaagaaaatgttctatatcctaatttagtgagtagcgtttggggtctaaaaagcttgagcggccatctaagatacatctgttggtcccatcacgttcaaagcaaaggagaatgaagaaaaccaaagacacaaggaaaatattagcccaaaggaataatggaccacacaaactacagcctctaccagcctgagcccagaagaactagatggtgcctggctactaccactgaccactctgacaaggatcacaatagagggtcccagatagagtgacagaaaaatgtagaataaaactcaaatttacaaaaaaagactagacttgtctgaaagagactggaggaacccctgagactatggcccccggacaccctgctaactcagaactaaagccactcctgaagtccacctttcagccaaagattagacagtcctctagaacaagcaataacacatgtgaggaacatgctttttagtttagtcaagtacagaagaccaaatgagcaatacctgcccaaaagcaaagacaagaaggcaggaagggacaggaaaactgtacaaatggacatggacagcccagggtagaaatggaaaggggagaatgctgacatattgccgggattgccaccaatgtcacaaaacaatttgtgcatgaatttttgaatgaaaaactaatttgtgctgtaaactttcacctaaaacacagtaaaatttaaaaaaaagaaattatcctaggcctacaactacaagatgttgtttatatttttcataaatcttaaattgaagtataatttttgataaccaatgtctttgaaatcaactaaaatcaccagaagaaattgtgttttcatcttaaaacaggccattttagtttattcatttattattgtcatcatcttcatcggattcccagaacccttcaaagtccgatccctcatcaccatcatcattgaactatctcagagctgcctgcagatgctcttctgtgagttctgaactgatgtcatcagcatcactgccttcagcatcttcatcttcacacaggtattctgctgctacacaatcctagcctttctgaagccgttgttgatggtttatggggttattttccctcaaagagaagccacccacttctgcaaacatctcccaattcagtcatcctgatggtgtcaactcatgaatcccaggctacatacattcatcccactctcttctcatggaagtcttgaacaggtggttgactgctatacctagtagctacagcttgcagataaggccacaggtatgattgctatatgggcatcagttaatacaattttgaatttttttttttctttgtgagcagccatggcattgaaaattagttaagacttcttcgaagagaatcccacctgcctggccctataacatttacctacccatacggtcataacatcacagtccatccatcccttttcattataatgaactaccacaatgctgggcagttttttacaaggccttgtaattctcttgaaaattaccattggctttaatttcaatctactcgctgtgcaaccaaggactatagtgaagtctgtcctcttgtactcagtgtttgtaatggctacagttttcacatccgaagcaattacagtcttggtggttggactgtccaaagacattgttaattatgtccactgcagtgataccaagttcagagattccactggtgacgaattcacagaaggtgatcatcttttgctcccagtcatccagaagtggctggcctacagtggttctcactcttttggaaaggccagtccttttcacgaatccagaaacccaggtgaaattctccttgaaatctgagattcctttttcattttccagaagcttcactttaatctgaattgcaacagtagaggaagcttgatttttttttttctcttcgagaaataatctagtctttcaagtccttctccaactcaggccatttttctttggtcccaaaacatgagtggttttgtgtattgattttctccatctcctctttctcgtgcctccgtttgctaatggatgactctccaacctcaaacccttgtctgtttcttctggccttgcaatgactttcagtttgaagttggtggtgtgggacttgtgtttaattcctgccatgaacctaaagggttctaagatttagatttataaactgaaaaaatatgcacaatataatagataactggctggttctggttaagagatctcaaaattcaaatgtgaggtgtatgagaagcaagagcctttttatatgctcgcaagcctatgactaaggtgacttatgatcaccgatcaaagacattggtgctaataaaacataattagactataaaacaaatagacctaacatagcttaccaccgctcatctgtctgtttgtcgtgtactgcggtggcctggtgttgctgtgatgctgaaagctatgccaccagtatttcaaataccagcaggatcacctgtggtggacaggtttcagcagagcttccagactaagacagactaagaaggacctggcaatctactgctgaaaaattggccattgaaaactttatgagtagcagcagaacactgtctgatatactatggaagatgagcctctcaggttgcaaggcactcaaaataccactggggaagagctacctcctcaaagtggaggtggccttaatgatgtagatggagtcaagcttttgggatcttcattcgctgatgtggcatgactcaaaatgaagagttgtgaatatccactaataatcagaatgtggaatgtatgaagtatgaatctaggaaaattagaagttgtcaaaaatgacaggaaacacataaagatggacatcctagatattagtgagctgaaatgggctagtattggccattttcagtgggataattatatggactactatgaaacaaagaggaaggatcagtaactggaaaatatgaccttggtgatagaaacgagacatgagatcccatgatagaattttgcaagaccaatgacttcttcattgcaaatacctattttcaacaacataaatagcaactatacacatggaccatgccagatggattacacaggaatcaaatagactactctgtggaaagggacaatggagaagctcaatatcatcagtcagaacaaggccaggggccgactgtggaatggaccatcaattgctcatatgcaagttgaagctgaagctgaaaagaattagaccaagtccatgagagccaaaatacgaccttgagtatataccacctaaatttagagatgatgtcaagaatagatttgacacattgaacaatttgtctggacaaggacatcttggacatcacacatgaagaaagcaaagggtcattaaaaagacaggaaagaaaaaaaagaccaaaatggatgtcagaagaaactctgaaacttgctcttggacaaagaatagctaaagggatctgaaggaatgatgaagtaaaagtgataaagagaagatttcaaagggcagtttaagaagacaaagtaaattattataatgaaatgtgcaatgatttggagttagaaaaccaaaaaggaagaacacactcagcattccttaagctgaaagaacagaagaagaaaattcaagccttaagttgcaatactgaaggattctatgggcaaaaatttgaacgatgcaaaaagcatcaaaacaaaatagaaggaatacagatagtcgctgtaccaaaaaaaactggttgacacacaaccatctcagaaggtagcatatgattaaaaacctatggcactgaaagaaagaaattcaagctgtactgaaggcattggcaaaaaacaaggctctaggaattgacctaatgccaactgagatgtttcaacaaatggatgcaacagtgtagttgtcactagtctatgccaagaaatttggaagacaacttcatattcaaacaagtggaagagatccatattcttgctcattccaaagaaatatgatccaacaggatatggaaattttggaataatatcattaatgacatacaagtaaaattttgctaaagatcattcaaaagtggttgtaacagtacatcaacagggaactgccagaaattaaagctggattcagaagagcatgtagaacaagggatctcattgctaatgtcagatagatcttggctgaaagcagagaacaccagaaagatgtttatctgtgttttatggactatgcgaaggcatttgactgtgtggatcataacaaattatggataacattgtgaagaatgggggttccagaacacttaattgcgctcctgaggaacctgtacaaagactaagaagctgtccttcgaacagaacaatgggatgctgcgtggtttaaaatcaggaaaagtgtgcgtcagagttgaatcctttcaccatattctgtatgctgaacaaataatcttaaaagctggactatataaagaagaaagcggcatcaggattggaggaagattcataaacaacctgtgatatgccgatgacaaaacctcgcttgctgaaagcaaagaggacttaaagcacttactgatgaagatcaaagactacagtcttcagtatggattgtacctcaacataaaacaaaaatcctcacaagtggacagataagcaatatcatgataaacagagaaaaaactgaagttgtcaaagatccacaatcaacgcccatggaagcagcagtgatgaaaccaaacggcatattgcattgggcaaatatgctacaaaagacctctttcaagggttaaaaagcaaagctgtcactttaacgactaaggtgagcctgacccaagccatggtatgcatgtgaaagctgaacaatgaataaggaagacggaagaagaattgaagcctttgaattatggtgttgacgaggaatattaaatataccatggactgccagaagaatgaacaaatctgtcttggaagaagtacagccagaatgctccttagaagcgaggatggagaaacttcatctcacatactttggacatgttatcaggaaggaccattccctgaagaaggacatcatgtttggtaaagtagaggatcagcgaaaaagaggaggaccctcagtgagatggactgacacagtggctgcagtaatgggctcaagcattacaatgatagtgaggatagtgtaggtccaggcagtgttcccttctattatacatggtgtccctatgagttgtaacttactcaacggcacctagcaacaacaaccacatagcttaatggtttcacttaagatgatctgataaagttttcacattcagctgttgagccagaagtaattgtgtgtgaactttgctttgtttattcctccagttaaaagccggagtcagaagactactgtgataattatgttaatgcagattgaatcgagattcctattgacagctactcgatgccattttgtcagtgcaggcttcgctttgtttatgcttccaattgatagtacctgatttatagacaggcttcagtaggattcaggttctgactgatgactcaaaagcagtttcaattgtttattttctgattaccagggttctaccaaactcaatccatgacttcttgaccatggcttatacctttattaaacaaatacgatcaaaagtaacatttttggtctattgaatgagggtgaacgaggacaaaattcacttgtggaaatgtcatgagacatttgtggtatgtgtatgggtgcactatgccagaactttttttacataattttgtcatttccacacatggtattgatgtgcgtgtgggcatactatttgcaaagaaacatggtatgtgggcctagtagagaactctctactaggtgccaatgttcattgcatcgaggtcgttctttagtaagattcaagatgaatggagcacattggtcaatttggctagtagcttagttaaagactctagtcccattaagaacattattcttggattttatgtgctacactggctacttaattctttgcaacttagctcaaattgttgatttaatatagagggccttcttaatccgagttattatcacctatagtcccagagacatcatctctcagagattattgctaatcttaagattttaattttcaggttgggccttttttagttttggttttattttcccccatcagggacatgtctgtctttgtaagcatccaagaatctgtcaattaatcttttgaaatacccgcttttgttttttctacacaggatttgctaaatgatatccgtgtaacctattattctgtatttttgagggacaaagagttgagtgtttctcatcaattattgtcttttctaatatttacaatttatcaacaagaaatcacaatgggttcaaaaatctttctgtatctctccacaggtgcttccttcagatggtacagaatcattaagctgtatttagcagatgacaaccaagacagttttctaagacatgcaggaagctagttagaaatctgtcttacagaatctgtagctcacggacaacagtctgagcttctgtactattttggacccagggcactgatagatttgctgtacccaccagctccatacccgcaaccagactgggctggataggcatgcctgcttagtatcagaacatccacttaagacaggagaacgtcagaggaagaggaagaggtaggggcatatacagctcccttaggtttatgcaaaacaactcccccacctgtagaatgaatttgccatttattctttcttttaactgctatctgaaaggttggaggtttgaatccactaagagttatctcggaaaaaaggcctggcaagctatttctgaaaaattagccattgacatccctatggagcatggttctactctaacacacatgaggtcaccatgaatcagagtccactccatggcaactggttgactggttggttagtgcatttaatgatataatcattgagcttccacagatgctcagcaaggtcaggctgcttttattttggctagtgctctatgatatgcattggtacttcaattaaacccaaaagtatcttcagaaaatgaaaattcatgagtcaaataattaacagatcatctgaaaaaccagcaacttcctctgtctgcagttgggagctgtaagatatcaggcatcatactttctatcattcttcttcacagagctatgaatagtacatctcttataaatattatttaaattagaatggctcctggaaatgaggactatttgggaataaatacgaagtttgttggctgaaaacacccagtgaataaccctgagtttctattgtcagcgtacacatcattctttgccatttggatacggatttaagaaatttgtgctagccagtgaaaaagcttaaatatctactgcacatgtgtttactgtggaaataaatcatcatgattcacacacagggactgcagatccttaaccattgttccagaaaagccttaagttaaaacaggcaaaacagaaaacattcacgtatgtgtaacagctgtataaaatattggatcttgattatgagaagaacaaaggagaaacaactttgtacagatgtagggtcccctgtgacaaacatttattgtggttgggaccagaagcagaataaagatagactcattttttccacataatttttgagtcataaattatgaattaagctccaacagataaagccgagaggaaattaatttaagagatgaaatcctattttggaattcagacagctgttttattttaacttggggggcaaattacatttcgatatttggctttatcaaacgtctttctctgaaatgaactgcaattttccattatttctctgaggagccctgggatgtttaggttcaagttcagagggtaaattgtcaacacagtcttgaccagctggaagagtgctgtccagtagaactttctacagagatggaaatgttctatatatgcactgtccaatatggtagccacatgtggcttttgaacacctgaagtgtggttagtgtgacagaggaactgaattttaatttaattcaatttaattttaatgactgtaaatttaaatagccccacatggctggtggctacagtattggactgtgtagtctggaagatcagaagttggagaaggtccttggtctactttccctcagccaatcaaaccaggcagctgtgggatacactttgtacattgtacatgggccttgtgaaacctcaatgcgccccttgacagctcagcctcagaagggctctcagcaggcctcctgggagcttatttgtgcaaatttacacatgaataaaatccaaaacctgttgccatcgagtcaattccgactcacagcgaccctatgggacagagtagaactgaccaaccctatagggcagagtagaactgccccatagtgtttccaaggagcgcctggtggatttgaactgctgacctgtttgtgagccaatgcagctcttaaccattacgccaccagggtttccaatgaatgaataggatcaaaaaattggaaactgcaaaggtcagtcctccagccctttctatcaatgcatatgtgtttccttgcaatagaacagactctctggtgcttcagaacgattcacatggtttgactttccatactctgaaggcaaagcaaataaagaagctcagtgagagcatttagacaaagagaacctttaataaactgaggcagagtgtaggaagcgtggtgttgtgaggaagaaatctgcatggacacagatatgagagaaaagcaaaccccagctggatctttgattacagagagtttgaaataaagaaacatactttgggatttacatataactcttccttccttatcaccgagcgcaaggttactaatactggtctccaaaaacaaagcaatggcttatttcttagctctaccgtctgcttacctgttcattctttgttcacggggctcttatctacatgtagcttaaaaatgtcagaaatttaagggacattcaattttaatgacatttcaccagggaggaaagaatctgggttctgtttcagtatgcctcgcccacgaagatgtcgataactttggaagtggaataacctcttgtcaatagcatttccgtagcaaaggttgttctgtcatgaacacatacctgaaggagcagatcagaagctggtctgactcgctgttggaacaggatgctcagcgttcgattctgttgttccaaatcaaacactcttgtcttcagcttcacacactcctccctcaggtcctacaatgtgcacattgaagaaaaaaaaatctgtaactgcaagacactttgcatattacaaccatatttaatgatatttcagacacactagtaaaaaataatatttttattcttcaaagcctccagaaagaaatcacacatgatgttttcttccacagcccactgtctgagagaattattacgtgctgggaagccaattttaaaaaaagaaaagcaccttgaaatcggaaatgcattaatctcgcatgctatttttcaagatagtaaatcttcgcaatataaagtcaatttaagtttccatctatatattttgcctcttcactgtcttcataaaagcaatcataaagcacaaaccacaaggacaataatgtttttgcagtgaacagaaatttgatgaactaaagaaacgattgcttttgatggagtcttgttctgtcatttgtggaaacgagtggaaaaccctcggcactatggctaatagagtcggtgatgcatttagtgggaaaggagcaactcagaagtgatagctttaaaaaggccactcgtaacttgcctactccaaactttctatttcctcatcttttggtgcattttggtctcacagctgggtaagaagtacaatcaccacaccctggtaacctttctgaatagctctttcgaaaagttcagacaccatggaggtcttttcccagctttcccttgaatggagctgacacatgagacctaggattcactggaatcccaccaagcaactgcttcccacactgacttgtgataaaggtactcgtggtactgaaatgtctacatccctctgaggggattcatgacagatggggcagaacaaagcccaaattcaaggttcttcaaaagctgatccttttctacatttcaagctttatctttcactatttcctaattaaaaaaaaaaaaaaaagaggtcctctgctttcaccatgcagcggacaagggtttatttattgctctcagaaagccctctatattcctgccgccctcccctctgccttcaccgtcccttctcatccacctcctccttataacccaagttagactctttgattgaagtccaattcaagttctaacgcctctcttttgcctgatatcccccaaggattcagaaatccctcttgtgtggcatttaacatataccactttgtataggttttatcttttgtactctagatttaccttgtcaactaaatgacaagttccttgaaaggcaagcacaagaagatactgaaataaacaccaacacaggggtactgttcttatattctttttgttccattacctagcacagcaccacacagagtaggagctagtaaatttttgtgattatttcattaaagggggtgatgatgaattctcttctctagtgattggtgtgatagagtttaggtttctcaacactcttagtttgtagatctatgtactcagctacaggccttacttatagctttgcaagcaaaagagaataccagtcatcagtctgatcccacagcctcaatagtggtcagggaggagggtgagcatgttgcatatccttgtatcaaacgaattgtgaagccacagcgatctagctcccgaggctttacaagagcatccatcatcgtgttcattattattgttgttaggtgccatggagtcggttcggactcttagtgaccctattttggtacaaaagaacgaaacactataccatcctcacaattgttgctatgtttgagctcattgtttacagccatttggtcaatccatctcggtgaggatcttcctctttttcactgaccctctattttacctagtctgatgtccgttttcaggacacgatccctcttgacaatatgtccaaagtatgtgagaccaagtcttgccatccttgcttctagggaacgtactggctgtatttcttccaaggcagatttgtttgttcttctggcagtccgtggtatacccaatatacttcaccaacaccataattcaaaggcatcaattcttcggtcttctttattcattgtccaggtttgtatgcatatgaagtgattgaaaacaccatggcttgggtcaggcacaccttagtcttcaaagtgacatctttgctttgtaactcctgaaagaggtcttctgcagcatatttgctcaacgtaatacattgtttgatttctcgactgctgctttcatggtcattgactaggtccaaataaaatgaaatccttgacaaccttgattattttctccatttatcatgatgctgcttattggttcagttttgaggatttttatcttctttatgttaaggtgtaatccttactaaaggctatagtctttgatcttcattagtaagagcttcaagtcctcttcactttcagcaagtaaggctgttgtcatgtgcatatcacaggttgttaatgagtctgtctccaatcctgaagccgcattcttcatatagtcccgcttcttgcgttgtttgctcaccatacagattgaataagtatggtaaaaggatacaaacctgacacacacttttcccgattttaaactatacagtatcctcttgttctgttcaaacaactgccttttgttttatgtacaggttccatgtgagcacaattaattgttctagaattctcattctttgcaatgttatccataatttgttgtgatctacagaactgaatgcctttgcacagtcaataaaacacaggtaaacatctttctggtattttctgttttcagccaagatccatctgacatcagcaatgatatcccttattccacatcctcttctgaatctggcttgaatttctggaagttccctgtaggtatacggctgcaactgttttttaattatcttgggcatgtgatattaatgatattgctctaaaatttctgcattctgctggatcaccttttttggaagaggcatgcatatggatctcttctagtcggttgactaggtagctgtcttccaattttcttggcataggcaattgagtgcttcgagcattgcatccatttgttgaaacacctcagctggtattctgtcaattcctggagcctggttttgtgccaatgcctccagtgcgacttggatttcttccttctgtatcatcagttcttgatcatattctacctcctgagatggttgaacatcaactaattctttttcgtacaatgactctatttcttccaccttcttttgatgcttcctacatcattcaattttttgtaatccttcataattgcaacttgaagcttgaatttttttttttctgtacctcagcttgagaaatgccaagtgtgttcttcccttttggttttctaactccaggtgtttgaacatttcaatataatactttgtcttttttgaggtgccctttgaaatcttctgtttggctcttttatttcatcatttcttccgttcactttagctattctacattcaagagcaagtttcagagtctcttttgacatccgttttggtcttttctttctttttaatgatcttttctgccttcacgtgtgatgtctttgatgtgattctacaactcatctgatcttcagacattagtgttcaatgtgtcaaatctgttcttgagatggtctataaattcaggtggaatatattttggcttccaaggacatgttttaattttctttggttgcaacttgaacttgtatataagcaattgatggtctgctccttagtgggcctttggcctggttctgactgatgatactatgtttctccattgtctctttccagatgtagttgatttgattcctgtgtattccatctggtgaagtccacatgtatagtcaccatctatgttgttgaaaaaaggtacgtccaatgaataaatcattggtcttgacaaattctatcatgcgatctcctgtgtgcacacataccatttggcaggggccatcttgggaggccaagatactgctcacattacaaggctacatttgcttcctttacttagaattcaacctgtgtctcacttacgccaatttttgttctttatgtgtatataataccccctgttcccgtacactaattgttttcacaactgctaattaagtaattaataaaacttgactgtgaggtaaataaatattaatagcacctactgggtgggaaaatggaatcattcccatttgcaggtggaaaaagggcaagggaaatatacaagtatgcattttacaaggaaacagggaacctgtaaataatggcagtgacaatttttagcagcagagctgagaaacctgagagttcttcaaatgggttaaaacaaaacaaaaaaggaatgaaagaaaaaaaaaatcaatatactctagagagtttttataccagtatccacatttcaatggccatcactattactaagggcacagtgaaagttcattagtgggaacacaatttatcgaccctaaggcctctctgtttgtcactattagattattcaggtgagcactctgcagatgggcaaatagaaggctgcaggattgggacactgctcttacaatcactggcaaatccaaatgaatggactgaaaatgtgcagacataaaataattgcttgtgttctttttaataatcttcttctcttcagttaagctatgtatagtgacggatgttaggtagctactgtccaaataaactgcagtcaaaaacatgcccctgtacccatgtgtgcacacacaaacacattcagaccagaaaaacaaaacgagacagaaaaaaaaaaaaaaaatctagcattttctgaccactactgcgatgcctgggcccagggtgacaattgtctttgattcctcttgttcacataggaacttactgacataaagaaacacatgacatatttagcctacatacaggagcaactattctgatgctgttagttacagaagcaaggcctagaacatccttctcaagtaagacttaaaaaccacacaaccctcatgtgtttaggctgagactatagctcaaggccaggactgtcctctctcacaacccttaacttcttctgagtccctattatatctcagcctcaagaggaggactccatggaaaatacaggttgtatcttctgaaatgaaaaaagaaggcacaaagcataattttatatcatgaggaaatgaagccaaagatttgaccacgtttaatctcaggtaggaaagtatagtggtctttggggttagaaaatttgcggaatctgttttccttgcaatctgcatattactatcatttggaaacacaaataaggaattacagctgagtgtgagggcacactatcccgagcatgtgctacactggcctagtgaacctgtctatgatcccaaaccttaacttccatgcagggtccccacactgtaatcttgcacttgtggctgaagaagattctggacccactgctatatacaacctacatgagtattttatgcatttaagagccacaccatggccaactccaggctgaagtaaattgaagaaaatgctggtggcttagaagcagaacatatactgacattatcactggagtattgttaaaactatttacatctgactttatcatgtagaaagggtgcagtggtgtacctagttcataggcagtgtctatcatgagaattctctggattggagctcagggcccgggctctggtcctcaatacccacatggccttgaggaaggaacttattctggttatgcctcattttcctcatctgtaaaacgaggtactgcacaaaaccaggcttttcaaaaaatctgatgtctacctacttcatgggctcattccttccctaaagcttactggccaccacacccaccagcctctcattgccatatctcttcttagtagctttcattgacatacccccatctctgccagggatcctaagacttctgtgaaaagcaaagccatttctggaaaaggctggatatatctcaggttaactaagggtctcaacataaaagacctatatcagccaagcaggtaacagatacatgtagaataaaatcaggcttgacaaaatgaatagggagtggtgagtcctgtgccaagctgaataggacatattttcatcctaaccttcagattaaagcctgtttttaattggatgatggctaaacaatttatgtaattatagtgaattgagcctattaccaaagctaattgacaatctcagattaaatgcttgctgtttttttaaggtccctggcaatcgtgaagttctatggtccaaaataagattgattctgagaaagctcgaatccaaatttgcagtctgttttgactctatacttacgagagcccagatgctcttcttgctagagaggaccagcaatgcttccagaagttttaagaattccattggatgtccttttgttttattccctgagatcatgcctaaccattggattttaatctatctcttgatttgcacggcatctctctgctctattgaactatggtgaggaaaccagtaagccagaggatggaattatgggggcagggtagtatggtgcgtaaagcatggggtttgcaggacaataaccccagattaaagtaaaggctctgctacttcctagcaattgaaactacggacaaataacttatctcttattttcttagacctacctcccagggtttcagtgagaacaaaatgagttagttcattccaagtgctggatgtggggtctgactccttgtaagtgcagagtaaatatgaacaagacccttttcaggcaactggatcctacacaagccattgctaaagaaaccaaaaatcaaacctgttgctgcgagttgattccaaatcacagtgaccctacaggacagagtagaacttccccataggatttccaaggatcggctgaaggatttgaactgccaaccttttggttaacagccaagttcttaagcactgtgtcactagggctccattcctcaagaagtgggcacaaatggtgtagttacccctcctgctccaagggaaatatgtggaagtttggaattctttaagcaaaagctacaaaattgctttctgcttcaatagctctgtggttggattatactataaaaaaaaaaatttttttttttttttttatactatacatcagccttattccatactgggaaagaaaaaaataccatacaaatgtcacttactctaatgaacatgcagataaatctgagatttctgatatgctaaaaaataacttcagggaaaatgcttttcttccaactctggtgttcatggcaaaaaccaacgaaggaccaagaagacttacattttcagtgagtgtaactgacttaatgaagataaaatatattttaggcaaaaatgtgagcttagcctggactatcgatttcaatttgcacgtgtagacttggacctatgatttggaggcataaatagaagtgacctgggtttaatattgtcacttcagccttactgatcttaagggggaccgtctgctctcttaagggaatccacaggtttttaagataaattgaattacctgactagggcagtatatgtacatttaacaacagataggcttatggaaatgaaaatttttttttttctatcggtattgggaaaagaagtacactcagttacttgaggatgcttatctgggctgattcatgataaaccaaaaaccaaacccactgccgtcgaatagattctgactcatagcgactccacaggacagagtagacctgccccatagagtttccaaggagcgcctggtggattcaaaccatcaacttcttggttagcagccgtagcacttaaccactacaccacctgggtttccgatttttggttttggattcatgataggccatgaaaaatgctttttggtctgcccggtgaagagctgaatccactacagatttgcctttgtgtcataataaatgatatattctaaagctgtatggtgacgtctatagtttgacctcaaggatttgttttggcaatttagataaatcacttgagcttgccatttttactctgtgtcagcgagatcctcctatggaatttgttttctcatttgcatttggagtaattttacttcttatattgtgcttttcattaaaaagaaattttagtctttttgcagcaattttacagttcctataaattttttttttaaaaaaaaccaggatgcatatggttctgcagaacatgattctgctggaatctctgaaagcccccggcatgccttcccacccccacggtgtccctgaggtacgctatctcacagtcgcacatctttctgagtcttactgcttaactgtagcaaggcagatttatctgtttactagttattacttggatttgtgtagctattttttgtggctgacccaaagggtcccattttcctttttattgtatcagatggcttcctcatctttttcctgaggcaccattaaaacagacaggcatgggaagtctttctacagctatgcacagagctgcagccgtgactccttcatagtttccaacaggaagaaagcaatcaagaaattaaagcctttgaaaaagaaaaggcattaaagtaacttgtggcagaaactgcaaattgtcttccaatacctgtttctccccttcttccacagtaccataaaattgaatttcagttctgtacatgcatagaacaaaggcttcattgccagcttccttaagtgtagccacgggactaactaaggtctgttcaaggagacgaaagtggaaaggaggcatgaaagcttctggaggtctcccttaaaagacagctgatacgtgccctgtactgtctttaccttcttcagctcttctttctttctgatggctggaatatggatgtgatggctggagatggcacagtcagtcatcttggaccatgaagtgactttggaattggagtccacaactcatgaaataacaagatagaagcctaggacccatggactttatggaatggaaccaccatactagccctatactgcctacctgtggattcatacatgagaagaaaataaaacttcaatgtatttaagccattactattttggtcctctgttactcacagtggaacataattttaacgccatataagtgtacttaaatttctttatttatgtggcatttgtgtaaaatctgaagcagttaaaattatctgtagaatcatggcatgtggacagaagtacaagaagagaaagtctagcaaaaatattatcacagtgcatctatagtaaaaactaaaaaataatattggtttaagtatctccatgagaagcagtcaacccctaataaaatacttttcactttttgaaattctgaaggacataaattatgctgctttcactagccacatcctcctgaaaacactgcatgatctaatgcctcctttggaagaggaaggctctatctcacagaaagagaagtcaaaaggtccaaaatctgaaggaaccaggattttgaaacaggctgctcagccatatcttgaacagtacctgagccactttttttttccttcttctttcttctttctctcctttccctcccccagcccatccctgcctccaagtaagatcctgatgttagctccccaaatggttaagtgttaaccaatgtttcctctaagactgtggaaaacaagtgatattgatctaagcctgtcaaataagaggaaggatggcgccagctaccccctgagctgatgggataatggcaggaaaagatcaacatgtttgagacatgaccaccaaatccaaacgaagaaagagagtgcatattccacaagttcctaaaacttatggccccttatcccttaaaaacccgaacccattggtagtctcgtgagacagacaactttaagaggagatcattcccctctgtctccatataccggtatatctaataaagctcttgctacccacctcacccctgtctcaagaattggccatttgcggcaggcggctctaactcgctaaattacggtaacaatttcacctttgagaaatatcctggcaagagatggcgaaagttcagtaaaattcaccaaaccagccaaatttggagaaacgttgactcagttcatcctaataatgtgatcttatattgcctaaaggcagaatagagaggtagcaaaggagtacttacagagatcatttattctacattgactaccaactggcttctataggaaccaaggctcagggaaattaaataacttccctaaccttaaagattccttgctgaatcctgggcttctattgatgctgcccacagaggacattcattttacaggactcaaagggatgcaccaatttatttaacatttatgtttcctaaataaaagtgataggtttgttatttatctgggtacatggagatctttcatctgtggcaggctttctatcacttgaccaagattttgaattttacaattccattggtcattggtgttacttcatatggcatctaaaacatacatggctttggcctaagggaataaacagcaatgtactgcgtctagcaatcatgatttcctagtttgacaatgtgagtcccaatctatgtaagtaagcactctgaaagagaacaaagccagaaagtgacttaccttttgagtgagcagagcttgaacaacttggttggctacctttaaaaaataaagaaaaaagttgtcgtttataataatgaaactttatatgcatgggctctaaattaccaataagtttcccacagcttgctatagctaattagctcctcatttgcctctttcctctacttctggaggacctgattcttttcataataagcctgtccttctaggcaatattttccttttcccgaaggtgaccttgttgctaattaagacagtgaggctgggaagatcattcataccttgactttcacatttccatattcggaaaaaataataccctttcatatgtaaagtactccaagaaggctaaaaaatgatctagtacaaagcaagatcctaattatctgtacacagcctcaacacgttgctgatttacaatgtcctttgcctctccttcctattcttttgctgtctgttttcctacttaaaattacttgcaaaagagatgggctgaatggagagaatggggacaactcattgttctctctctgtcttgttttcatcctccacgtctttgctcatgctatcctttgttgttgctacctgtaacagattctgctagttgtttatgacagcatccattctccccttcctctttagtaataaacctcagtgttttggctgggcatatacaactgggcacatttcccagtctcccttgtagctaggtgtggccatgtgacaaagttctggccaataagacacaagtagactattttcttgggctttcaggaagtcctaaaaagaaggaagctcactcttcttgttcccatttttccagtctgggacatgaaagtgatggccagagcttcagtagctaccttgacaacagaagtcccatattatgtattaaaaaaaaaaaaaatagttgggcagaaatacagggcaagtctgggtcctgatgacatcatgaagctgcactgcctacttttgaacttctttgtgtgagagaaataaaacagccattgttattttttgtttccaccaatatataaccaaatataattcttactaatatattattaacacaatacagtttttcttcctctaagcattagtcagttcagtacagcagggaagatgggcttctccccagctgtaggaggaagacattgactgatttaagccaaccttggtaatcccattcctttttggtgtgtggtttaggaatgagcatgtgacacaattccagctaagagccacatgtaaaaccagtaatatatccctggtattacatgcttccggtatcttctacatacagccatttttcatttctatacctatttgtactaagatttctttttcatatggagattctaaaacactttacaaagactcactgttcaaacttcaccatagccttgaagttatgtatctacatggctagtgtggaaaattaaggtggacaagtgagttatgtggcattttccagccaatgtatgtaagtgtaaacatttggtgtgataactgaaactgatagcattaaggaccaagtcagggtatttaaatatttttttaccctggtggtgtagtggttaagtgctatggctgctaatcaaaaggtcggcagttcgaacccactaggcgctccttggaaactctacggggcagttttactctgtcctataagttggacagggtcactataagtcggaatgaactcgacagtgatttttttttttttttggtttacatataaattatttctgttcattcttttgtttcttcatttattccatacaaatttactgggcatctatttgcaaagctaaattgctgggatatggtttttggcattaaacggtttataactggtaggaggccagcaaaaaacaaaacaaaaaaaaattgtaacacagtatgatgaacacgtaataatcacggcaatgtgcacattcaatcaaaggctgaaggacacactttcattttctttgttttctcctgatagcaaatttatttttggtgatgctaaactatttgtgcttgtttccccatctagtaccgtggaagagattatggtgagaatgttttcatggagcttaatcatttcttgactcaatattgacaaaataacacttccttaatggcacttgtctaccaggaagtctcatagaaaattaaaatacaggctgtcatcaacatgtggtttggaggcattcacaccacaagcagtagacgactagaatcagattacccataattgatcagttgaactgtacacacaagagggatttttctttccataaaaggccttgcaaaattcacattgttgacgttaagcaaagaagaaagacctttcattgaaattaaatatcgtttgaagaaaaactatcttcaggtattttttcagtgcagccaaagttaaagagtcatattcaagaaataccacagatgaaaaaaagcaaactttcattaactcatgtttttgtttttcctttagcactttatttatacatgatctcaataggtgatgtatgttaatcagctcacctaaattgaccaatagaacaatcttggaaatctttaagttttcaaacattcactccaaactaataaagaatttaaagtaaaactatatatcatctgttttattcttgtaaacttagaaaaaacacacatacacacacacagaagaactgaataattcatgcaggttgaaacatgaacaaagtgccaaagttaattcattccataaataatctttttgaatctcaaactttgaatttgattcatatcatcgtaagactgcctaaaatcaatattttcttttctttctccaaactggtccctcacttaaaccagtctgtggaacaatggtcacataaaatagctctatacatgatttaacagggcacacagactaatattctaactgtaacagcccacaggagtaaatatgttatatctctgcaatccaagtatgttgccctataggtttccagactctatacctgacaccattccttctggcatgtattttggacaattgtttgctctacctgaaaattgaacaaaggtactctaatgcattctttcttttcccgctgacaggaggctatattacccagaaggtctcacgggatctttgaagaagaggaggcaggttacagaaatgctgtccttggtattgtctataaagacagtttcttgggttgcgttactacttttaaatagctaagcttccccgatgaatcacagaacagttgtttggagtgtgtgcatgtagtacaacctacaacccctaacctgctcccaagctggtccctggaatgggcccctggcctcatcctagcattatgccctaagcacctgggttgtaaattatcccccatctgcaggtccggctaatgaaaacaaagaactttcagggtcacctgacagctttcctctcgaaagaaaaaaaaaactagcagcagctggcctgggccagggagacctgagacacagtgagcaaagctgacagtccttgaagctcctggcatgttttaagatttcccctaggctctctgtggagacccctccacattgcgcctaggagagggaggagggctgcaggtgagacagaggccacagagagagccaggtatgttttcttttcattaagaattctatcatccaggccaactcctctgacctcactgactttctacccccacacaggtgtccaggggtcagggttcctccacactctcatgggaggggcctgcagaaggaggaaaagactgggatgcgacaaagagtctgttatttggctacaaaacaactcctgtggcttaatgagaagtcacaccatggggtttactcagagaaaaagaaaaaacaatccacttactgttcagtgtcgagtcaattagattctgactcacggcgaccccatgtgttacagagtagaactgctccgtaaggtttcaaagtctgtgacctctagaagcagatcaccaggcttttcttccaaggtgtctctgggtgggtggttgggtgggtttgtttgaaccatcaacctttcagctagtagagaagtgcttaactgtaccacccagggactccaagttatctattaaccaaaaaaaaaaaaaaaaaaaacccactgccttccagttgattctgtccattaaaaaaaaaaaaaagtccatagagggagccaattcttactccatgaagaagccagcctaggagtggagtggagggcaggacacctttgggttgattggccaggggagtgaggaactcagaaaggcctcatattatgaccgtcctgcctggtggtcttgctttcacactttacatactatttcattatgcaaaacaacagtctcgtctgcaaggtaacttaaaaatccagtccagaaagcaccccccactgccgttgagtcatctctgactcagtgaccctgtaggacagagtgaattgtcccatagcatttccaaagctgtaaatctttatggaagcagactgccacatctttctcccaaagagcaactggtgggtttgaactgccaaccttttggttggcagcccatcgctttaaccaccgtgctaccagggccccttcggaaaagcattcgttttggaaaatgtgctgtggagaagtttctgtgcttctgggtttggtttattgtactgaggcagctggggaaagcagacgggacatggggctggaatcaccagaaagacttgggtttgaatactggatatgatgattatacacagacatgtactgggcttagaagagcaacctgactttctcatccataaaggaggggaactgtttacctctaaagctgttgggaaaaatgcatgagataacagacataatcagagaaaccacctaggactatacctgatataaaaaatagtcaccccataaatgttaactctgaatcaggtcagtagaatgcaggtgaataaaacatattttcaggtaagcagtttaagaaagaacggtttaaggagaaggggtttcatctgcagaggaaggaaatgggtgtgtatggaatatacatgtataaatataagtcaatgaacagctataatttctctatatatttactctgtaaagcaaacctgtaagacacaaatgaggaagaaactcagagaggtaagtagaccgtcccacatcgaacagccagagtatggctgtgacagcatttgaaccccggtctgcctaatccaaagtccacgtggtcacctcttattaaaaccaatcttaagagggtctgtcattgttttctttccagctgatttactctttggattatcttttgagtttgtgcgtaataaatgactgtgcagtctctgaagagataactgggggagggagaaattaacctaaaaatgtgtttgggactcaagggataactaatttggaagttaatttgctctgggaaatcttcactcattcagccattcaacaaatatgcactgagcaccttagtacgtgccaaaaattgtgctgggttctgcagaaataatggcacatagaatgtaggtgctgccttaaggcggttagagtctagcacagaccagaatcatctgtttgatttcctggcatgtgaaagtcatgggcaggatcactttccacatacatctgattttaaagatgactttgcatccagatgtgggatacccacagagaatgtcctggtgattccaccatccagtccaggcatataaaatatggacgagagacaggtacaaactgtccttaacaacatacttctccatttatttagccttggtttaaaaggaattctgtaaacagttaaagtgcttggctactaagcaaaaggtctgtggtccaagtccacccaggggtacactggaagaaaggcccggtgatctccgtttggaaaatgagcgaaggaaaaccctacagagcacagttctactctgatacacacgaggtcaggggcaacttgacccttgtcaacagcaactgttttttgggtagaaggaattctgatttttccttttttaaactaaattcaaaggtctgattttcctctgcctttgtgctccaaagtgtggtctacagagaagtcagaaaatccaatcaaggcatctcaccgacagtaaggaactctggctcaacctgatggtctgaagaggctgccagggttctctacacttccatcatttattagtccctcattctgactgagaaggggtaaggtctgggaatctacatttttcacagtcactgtacatctttctgatgcagagaggtttattttttgcttgcagacttatattaactggcacattgttgaggaatcagaaataacccaaaacttccgcacaggtctgtggctcttctgtcactgtgtacaagcatggctgaacgtcatcctgccggagaagctttctgaaagtgctctccatgacacagtattcacaaaacctaatgagcttcttgttctaagaatgtcctttccaatcctgccccttctcttggttaattctagcactgcccacctttcccccaaccactcctcctgccatcggcgagtagactccaagttcccagagctccccaggcagccttctgcaagtccctcacctcacctctgcaatcacccatgttctcatctccctcactccctcatctactagactgccagttccttgagctcccagggccatggtgaggttgacacccagtaaaggccacaactgaacgcatctacatggagcacagcggctttaggaggtgttattttgcttattcatacaggtatttctctacaaggaattacaaactcaaaccaaacccactgtaactgagtccattccgactcatagcaatcccatagggtttctaaggctgcatagcttcgtgggaacagcctgccacatccttctcccttggattcgctggtggttttgaaccactgacctattggttagcagttgagcactttaaccaccatgccaccagggctcccctacgtgggactaggccaatgctgtcgagttgattcggactcatagcaaccctataggacagagcagagccgccccatagggtttccaaagagtggctggtggattcgaactgctgaccttttggttagcagctgagctcttaaccactataccaccagggttccatatagtgggtcttacaggaagtgaggtcaaggcaatacagtgcacaaacagacgttcactgcctgccagcaaactgcctatcaaacagtctaagaaactcagttcaaacaggaaaacctccaatctccgggagagaaacatgattaattcttggttttgcctctggttttccaaagcaaggagatgcagcgggggggaggtggcaaaggtgatgtaaagtgtgcatgtttgcacttgggtcccacacttgggtgcatatgtttgcctaacaaacctctgtgtgtgtgcatgcatgcgtgcgaatatgtatgtacagatgtgggtctgtttcctcctgaataaacacacccatttatcagaacacacagaggagtcttcagactccacagcattttccccaaatctgcaatatgcccttcatttcccaggaaataacaatcagtgcgaagagaattgaagaacgttttaaacttacattttatccacctgtgtaggttttatgtcccttactagcagggaaataacttacacgaggccttaccttgttagtttttttttaccttgttagtttgtctaattagtataaaagaccttgaaaagaatttccagttggcatgatgactacattcaactacccctttgagagtgttctcttacaacgcatggcgacgaagtgtctaccctcatgcaattagttaccgaacaactggcatgtgtaaccaggggccggtcgtcatgaatataaaacgtttgcacagctccacggaggaggtggctttctactgcaaatcacctcttttggcaacagtgaagttttgcaattaagaacagagggaccctccctctaaaaattctgactttactgggaacttgacaagagatgatattgtgggaaaacttatgttttgcacatgctaatgaaacctgcagaagacagacatggcgaacacacagacaacaggccatgcatttccgtaagaaaatgctgtgggctttttgatggatggcgagggatgatgacctgtgggagaactgtgacaaagacgaagcttctggggtgtgatacacatacatttgactcctcattagagatgaagtctcattggaaatgtctgtgcaagaggttaaggcgaaactttgctgatcgatacgtatgacccaagggcaatatttgctcctttaaacatccttcggtctatttggtctttcttgccctagactttgattggaccaagagcctggggaacagggatgaggggagctgaactggactcaacagactccgagtcatcatttccccttttatgtcgacgagaataactttggacattggaaagattattctgaatctttttaagtaagtcctgacagggcaaagaattgcacacgccattttccttgagtaactaatacactgtatgtgggtggaaatattacacaaataaaatattaaatagttaaaccattttctggagacaggttgagagttcttcagctatgtataagacattgtacttacagtgttgtctctgaggacagaggctctcaaaccgtagtgtgcatcaggatcacctggagggcctgctgccacagacctctggcccagcccccagaatttctgattctgttggtgtgtgtggggcctggggatttgcattctaacaggtgaggctgatgctgctagtccaggaattacattttaagaaccaccatggagggaaataccaaatattactggaactcaggtgtccctgggtagtgcagatggctaatgcccttggctgctaaccaaagttggcagtttgagttggctcagaggcacattggaagaaaggcctggcgatctactactgaaaaattagccactgaaaaccccatggagcacagttctactctgacacacatgggttcctcacgagtcggaactgactcaatggcaaccggttcagctttatgggaactcagaggacagagattacttccagtttggagggacgggaaaggtatgtggtagtggcggtgtgcatgggggtggtatctgttatgtgtcaggcactcagtcctctacagaaaagtgagcagagaacccaagatgttgctcaccagagaacacacagtgtgggaagcagcaagactgggatatgagcctgtgtttctataggataccccatcaacctcggagacagttatatgtgtgacaagaaagagaagggtgtaagaaagatcaggtagagtttcttagaagtggtttttgcctattatcagagcggagaaaaagacaaagatacatatttatctctactggtaaaataatggaatcagatgaaatgcaggcagttttctttttcccccctcaaacctgtgtcagctacattgtaacggatgtcaaattgaatcccacagaagaacaaacactagttttagggtgtttggcagatgactaaagcagttacccccatttacatgatggctccaatcaccaacaataccccagatgagcacttgccagctaggtgaatggccagccccagctggatgactcagcgtggagtgagggcgtgatccctgggagagaataaagggaattttcccctcaccctccagaaagtcagaaacgcccaacatctttgctatcgtctcttcgttatcaacaaataatatttactgagtttgcccaggcgtgatgccctgtgttcttccagtccgctccgattttcttcctcacttccttttctcttcttggcttgttcttgatctattgatttttttccctctggctgtcagctgtgcgcaccatccccacccacctctatctaggatttgtttttacagagatggcatacaactgaaggtgccccttcacaacatttctcattcacaggcagggatcttactcactagaaagaaggaatttatccaaccagtgaagcttatcctaactgtgccacaagactactggacaacaccccaaaggaatgtacaaactaggtccctgggtggcgcaaacagttaagcactaggctgctaaccaaaatgttggaggtgtgaatccacctagaggtacctcagaagaaaggcctggtgatctgcttctgaaaaaccagccattgaaaaccacatggagcacaattctactctaatacccatagggttagagtagaattgagtaggaatcgactagatggcaactgttggtggagcgttggtataagaaatcgggcagggggtagagaaaggaagagggacctaccttccttctcaatggccacctgctataacgttctttagagaagaaaacgctaatattctgtggagtctggtaatacttctatactacgatctgctgagggaaatcctaagtagccctgtctcttatcatgaaacctctccatccaccttacctcatccagacatctctcatactgttccctttggttttcattttccaaagccaatgctgaattctctgcctgcaataagatacaaaaatatacaaataaatcaatggaacgtggcattatgtgacaacttgctcaatacaattactaaatatatctcctcaggatccaaaacaatcttttagaagtacctttgacaagtttgctctaagtaccattatagataactcaggagctgcttctgtctcatcaaattgttctcgaaaaatatagtacgatttaaagaaaagcaaaacttgatactcggaataggtagaaaatcaaatcatccctgatgtgagagtgttccgtgaaaaggtagttacgctgtttatttcttacaggtgtttccaagctagaacattacttctttcatgcgtgtatttgattgggcccttgctgtattccaggagctatgctaggggttatataaaaacgtataaaacacagtggttcccataaagaagggaatagtctagtagaggaaaacaattacatttctcacattgaaagctataatgcaatagggtcacagaaaaaataatcaagtgacttcgaatgaagtaggaaagatattccctggagaggtgacctttgactcagactaacaggcattggaaacaacaaaaaattcgaattggaatgaatgaaaagaatattatagttctgaacaaaataccaaggaagtgacatctgacttgatttatctatcagaactaaatcatccaactcggccagaatccagggtgtagaaattgtcaaatgacatactatgaaaatgaataatgtcagagaccagtcaacagcactgcagagaaaaccttgggttcaataatgatgacaaagaacaaacagatagcgtgcaaatgagatcggtagaaactgagcaaggctagaatggcctggaagaaagaggaagacagagggaggagggtgtcctcagaagagaaaaagaaagaagaaaaagtccaattcactgtagttaaaaaggatacacccctctggctttccctgctgtaatggctggtctttttcagaatgacatcttcccagcttgctgaaaatccatcagttcagcaatggcaggaaggtcacaataaggtcaggataatggtatttctcaaaaatcatggcttggccccaaagatggaaaaatgcactcctctatgactgccaccctgaatcagagtcacgtggcagtctccttaaagtcacttaacaactgtggtgttgttctgaccacttcagtctgcaggccaaagagcttcagattcagctcctcggcaaaatacagagatcacaaaaccatccctaattacactgtcattgttgctgctagctgctagcttttgtggagtcagcccccaactcatggcaactgcatgcatgtcggaacaaaacgtcacccagtcctttgccctccctgtgatctggtgtggatcagaccattgtgacccatgaggttttcattggctaattttaggaagtagatcactacatcattcttcctagtccctcttagtcaggagactctactgaaacctgtcctacatcacagcaacacgcaggactccactgacagatgggtggtgggtgcgcatgaggtgcattgccagggaatcgaacccaggtcttcctcatgaaaggcaaaaattctatcaccaaactatcagatacctcctaatcacactgtactctgttctattttaaaggtgtctaaacacattatgagaagagagtagcacgggcaggggtaagcgtgccctccagcatgtcgtctgagcgtgcacattttaatctagcagagtggtatgaagcctgagaacaaagcacatcaaagactggagctggatattggacctccttccctttatcatcctcagtgaaaacttatgtggctactgcagcattcaaggcagtttgggatcattcagccagccaaggtagtagccattgtggaaggtagttggctaaaaagctgttttccactggctgcacttaaaagctacagtctccatacccagtgactgggactgttgtgtatcttggaggaaaattttgttgtccttgaaaatttcaggaatacttctaagttctggccacctgccacaggtataagcacaggtacatgtgtgtccacacacacaagatgcaccatcatgatgtccttgctcttgcgctcaacaaacattagggatccccactaggtccaggccagtgccaggcattggggacataacttcacagaaaatggtgtgcctgtttcaaggagtccaggattcatgcaatgagacatcttatgcaggaatcgtctgtgtcctgcacagatattttttgaagagttcacttttgaagagctgaacagaaaacacttcacaatacaacctctgcatactcccataatttaaatccttaggtggggccctagacaagtggtttgcaaaaaggatacatccttgtggctttccctgctgcagtcagaatcactgggggagcttgtcagatcccagatcgtggggccccagccccagggtttggatttcgtatgtctggggcttctggctatctggggcaggacctgccaatgtccctttctagcgggtgatgctgatgctggtctggggaccacactttgggaaccagtgtcccagatggatcagcttcagaatgaaggtggtcttcaagcccttccttcctgctgctgccatctcctttgacttactccaggagctttttactgcttctctagaactggggatggagaccataatttgttacctccacctcatgactctcttgggggtagaacagatacctgttctctttgcttcatactctacatatttctagtagcattatctaccataatgtttttcactccatacagataacaccaccatataattttggatttttctttctcttaccctctttatgagtctctctctctcccgctccatcagtgattctcagtgggggaaaatagccccttggaggatgtcatggattgaattgtgtctccccaaaatatctgtcaacttggctaggtcatgattctcttgtatgactgtctaccatttatcttctgatgtggtttccctatgtgttgtaaatcccatcactatgatgtaataagatggattagtgacagttatactgatgaagtctacaagattaggagtgtcttaagccaatctcttttgagatataaaagagagaagcgagctgagagaggtgggaaccccataccaccaagaaaacagtgctgggagcagagcatgtcctttggatctgaggttcctatgctgagatgttcccagaccaagggaagactgatgacaaagaccctcctccagagctgacagacagagagagagaaagccttctcctggagctgacacactgaaatcagacttttagtctactggactgtgagaataaacttctttttgttaaagccatccactcgtggtatttctgttataggagcagtagatgaccaagacagaggatatattagcatgtgtgtgtgtgtgtgtgtgtgtgaacagtaaaaagatactcagttcagaaaatattatttgatattgcattatatctggataataataaaagctaatgctttcataatacaaaccaaaaagtaagctcggtagtcttcttgcctacaggagatcagcatatggagtaggcaggagatgggagtgggaagaaggacctgtctatcaccccaggggaagagtgtgaggatctggtgggaggctagtgtgctttttaaacttacctcctttttattttttataataggagaaagaaggcctagcttttggaacaagtaggcattcatctgaatcttgacgctgcttctcgtctacaatttctgcaggcaagcactgggactcttggagcacgtttaccagaaaaaccacacccactgccatcgagttgattccgactcatagtgagcctacaggacagagtagaattgctacacaggtttcccaaggagaggctggtggattccaactgccaaccttttggttagcaactatagctctgaaccactgcacgaccagggatcctgagcatgtttgcccttggcaaatagaagtaattaaaaaaaaaaaaatctgttacaggtttgggaaggattgaatgagataatgaacctcattatctcagataacgaagagcctagaatgttgtaggattcaatgaatgttagatcctttctgtcctttgtaaaacatgggcagctcacaggcagagggaggtggtagaagtacctccagggccctcagtgtgactgtttttacacggtctcacataaggtaatattagcttaggtactggctcctttggcttgacctcccccttttctgacccttttcctcatttccttctcaccccttatgcccacttccaagtacccactcatcaactaccctggcgctatagaaaaaactgctctcagacaaggtactcataacttcattcacattaagattcaaaagactgaccaaaaaaacaaaaagagcactaaggggatttgcattttaagagaggattaaggagtgaatctttaattgcagcattttaggagtcagaaagcaggcaggtttgctgggatatggaagaggcagggcactttacttcaccttgtaatcatgtaagtgaccacctactacgagaacttgtaagaccttgaaggacttgatcatgatactctctaccatgtcttagggtagatgaaaagaacaacatcgttcctataacccaagaaaaaagccaaaccttttgctgtaaggttgattccaacccatagcaaccccacaggacagagtagaattaccccatagggtttccaaggagctgctggtggattcaaactgccagccttttggttagcagccgagctcttaaccactgtgccaccagggctctgtagttccatagtcttttccaaacagtacttttgagggagccacctttcgatctgtagatgccattgagccaggtacctgcctttgtgttctcacagctcccaccctgcacagcctctgttcctgcctcacctcactcaagtgcaaggcactttccattctcccttctgctcttcaaaggcaagcaccagtgtcttcccatacccagcactaggcctataacgcagtaggggctccaggctacctcctttccatgtataattcttaaattcaggtgatatagactgtaacttggatttttaaaagaaatattaattggtttagggagataaacttttctgttttatgcgaagattctgttttcttgtttctacgcaagcttactttgcaaacctttgccacttgcaaaggccataggtctgacatctcggcaaatccccacagaggttgatactactttagtggatatttttcccaagcccaaatgctgtaaacaataacagagaaaatataagcaaaccatgagactgacatggagtggagagtagccacaccacgcagagaggcagacagaggcacatgggcctgaacggaaaagcacacactagcctcccagaagtcaggatatggtctcacctcagcaaagaaacaaactcctaaccggtgttgtgtggtaaatgtttaacaactggtttttagcaggaaaaagtcctgatttgtagcatttgctgattctgtggtgtaaatatttccgccatgactaattttaaactgagagtgtgacgttgccgcttgcagagttggggaaagatgagtagtaaacctgttgctgacgagccaatttctactcatggtgatactataggactcatagtgacactataggaagaaaaattgccccatgagtttccaaggaatgactggtagattcaaactgccgaccttttggttggcagctgagctcttaaccactgcactgccagagctcctgtgatgcatagttgtcaccttcatatagtattcctgtcaaatcagatacagagcttagacaacaggaaaatgtaaaacaattaggaaatgatgagttttgagtatgtattatctttgtctttaatataacttacttaattctaactttgtataagttaatttttaaaataaagctgtgtttaactggctcgccaaattcctgaaaaattaacagttgggtctagaaagctgttattagctggctttagcgaaccattgctcctatctattagagaggttgggaatagctctccgttggttgttaactacaaatttgtatctaatacaaatgatttgctgattatattctgcttggaatttccaccgggaacatgtttgtcccagtggtgaacaccaggcctcagtggtataccactccagctctgttctctccctaattaaggtcgtgacaactgcctactgctattgtttatacagttgggtttgggaaactcaaggtgttaatagcacatttcctcccttgttaataaggtttctccctttgtctctgcaaatgggatggagcaaccacatcacacctctcccatgacttcttctccgccacattttccccataaccagatgttggaggaaagctcatctattctgcctgcttgggagctgaacttgggttgattcacaaagtgaagattttcgtgtttgaaattgtgtttttaaagactgaaacaaacatttcattatgctaaacatttaaaggtaatgtcaaattatttatattaaaatagaaactctcggcaatttaaaaaaaattaagttcaagatataacaagtgtttaagttcaagatataacaacccaggtaatctaaagttctctgcaaaaacacatttaaacgtgtttttacaccaaagatacgtcttctaagatacaaaacctctgactttcaagctataggggactagagtgttttttgtggtcttggaagtgtcactgagaattccaccaaaaaaccccaaaccagttgccatctaattgattctgactcatggtcaccccatgtgtgacagagtagaactgctccatagggttttcttggctctaatctttacagaagcacatctccaggcctttcttgtgcagcactgctggatgggttcaaactgcgaagctttaggttaatagttgagtatgaaccgttttctccatttaggggccttgataattccacagaactgagaaacgtgagtgaatcgaatcactgcgttgagtatgaagtatttgtggtatcaatcacgaggcattttagaagtttgttgaaatatttaaaaaaattgttgattgatttgaagaaaataacattaattaatatagtgaccttattacctcatttacatgaagccccgagactgtggggaacacagttagtttcattttagagataaagaaactaaaagagactctatccatataaacccttcattttatggagatatcttattcataagcacattcctttgtcctaaagtatcctgaagaacaaaatatatatgaaaatagcctaaaaaatgcctaagagaatagagtgtttgtccccactctatcaagaagcaaacaattcaggattgagaataggccaagaattccttcaaaaatccttggagtctgaactatacatggattgaagaaaaacagggaaagaaaaaagctcagacatttgtgtcccaggaattattttacccaaaataggaagtaatttaaaaatgaagattaaaattacagagagatattatacacccatcagataggcgtgaatggagaactcttaacatagcaagtatggtgtagtggttaagtgctacagctgctaaccaagaggttggcagttcgaatctaccacgtgctccttggagactctatgaggcagttctactctgtcctatagggttgctatagggtcagaatcaactcgacggcaatgggtttttttttttggattgagcatgtggagcaacaaggaccctcacatgccattggtgggggtgtaattgggcacacctaattgaaaacagagttgggcttaaattactaaagtagaagatgctcataccttctgacccagcaataccatttcctggtgcatacactacagaggcctgtgtacacatgcaccaggatgggtgtacacaaacgtgcatggcagccttgtgcttaccagccctcaggtggaaataatccaaatgaacaataatcataaaaagggcaatttgtgttaaatttatataatggaataccatatagaaaaatgtgtgcaaaatggataaatcttgcaaccataacactgagtgaaaaaagcaggatatctatcaatctctcaatcgatctatcaatctatcgatcatctatcaatctatctatcatctacctatttttatgtaatgtatgtgttcacaaatacatatacatgcacaacaccacatttagtttagattttacatacacacacgcatacatatattccaacatgattctacatacaaagttcaaaatctggaaaaattcagttacactgtttagagatatataggaagtaaagctatatttttttcaaaaagtgggaaaattattctagaagtcaggttaatcatttcctctagtggagaaaacagaaactgtggtgagagaaacccatggaggatcttgggctactagcaatgctccatttgttgacttggtggtacttcctcaggtgtttgctttataatgttttaactataaatatacattttatgcattttctgtaaatatattttaacacacacactaatcagtaagggtgcactaggcagggcctgcgggcaagggagttcttgaagggtcagtgaacttgggcaggcgagttccattacagcagggtcacagggtcactgtgtggtgacagatcagatggcatacagattaggtgggatacagacagaggggtggaaggagtcagacactgatgtgaagggacatgagccaatgtatattttcctggcaccaatgacaaagggggaccagctgaaggggaacctggaagatcagaaagcacgtgattgcagcattcccatcggggaaaaccacccctgaaataaaacagtggcatcatggagagggagcaagaatacacgtgagagagaattcagaagagattcatcagctcctaaccagaagcagagctgagaaggaagaggacatgtcagtttatatcctgggcgtctgaaagggtgataaggtctttaatagaaacagggaacaaagtttgagataaacagtgttatgggagatttttagaaaaaagcctattgctttgccatgtaatgatttttccccttcttgcagagaagagaaatcatacagaatgtatgactcctcgtcttagacaaggtgtgtcagcagtcacactgacaccttcctctttctttccattgcttgtgtgttttcatgaaatccttttgttcagagatgcctgggactcactctaaccctacttatttgctttagggaagaatattgtctctctatttaagaattcatggggcagtggtggttcagtggtagaattctcacttttcacacagcagacccgggttcaactcccaacctgtgcacctcaagtgcagatacaacccgtctgtcagtggaggcttgcgtgttgctgtgatgttgaacaggtctcagtggaacttccatactaagatagaataggaagaaaggcctggcaatctacttccaaaacatcagccaattaaaaaccctatggatcacaatggtctgatcccattgtgcacggggtcactatgcatcagggactaactcaatggcaggaacacaacaacaacagcttaagaattcagtagggaaaatgggattatgtttgaaggagagtgtgattaaatttaattatcaaacacaacctctgtcctttccacctgggactactgtccttccagttgccggagcagatggacagtagagggtgaactgaaggtcctactctgccctgctctccgctttcatctgcctacagcatacacataaacaaacagccgctcaagggcactcgatcggtccacactctccgccttcctgcagggaacagcccgtaaaaagggcattgtctaaagccagtttggccattgccttcagatgaagctaaaaggacctgtgaaaatcctctgacttgattctgtcatttggtgtcctgaaatttccacactggggttaaaaatctcaataagatctggccatgagagtggcattatcctcacttcgtggtggctctcaaaatagtcagtctttggagaaaaaaatagttcagttttcacatgagactatgtggggcagctcctgtctggaggcgagatgagaaggcagagggggacagaggctggctgaatggacacgaggaatacagagtggagaggagaagggtgctgtctcattaggggcagagcagctagaagtacatagcaaggtgtgtataagtttttgcatgagacactgacttgatttgtaaaccttcacttaaagcacaataaaaaaaaaaaaagttcagttttgtacatttgagatgagagggtgacatctagaaaaaaaagagggctgggagttggaaatgtgtgtctagttttagaaagaagccagggttacagtcttggttgtagccatgacggagacgagtgtgggagctatggaaaatgatgatgaagataacaacgacagttttgattaattaagtgttggaacactacgtgccaggctctgtgctcagcacttaatgccttacctcatttaattcttaaaatactataaaagatgtattgttatttccattttacagatggcaaacaggttcagagaggtcagtagctttctccaggttacacaggcctatttgaatcagaagaactctaaaccactccacggtactgcttcttaggatgtggaacttccaactgttttgctgtaatgaaattatgtcgaagtgaatcccattctagaaatcacattcctggtttgcaagtccaaggctaaaagacgctctgcttttctgtagagaaccaccgtgtagcaggatttgctgtgagaaccacggggaacgaggagagcaaacacgtttctaccccagcctactttctctcattctagcttttaaaatgttttgggcagctttgtagaggtgaatggctgggagctggttttaagcagctgggaccctgaggtgataagggatgaggggaacaggaatgtaaatccttatcgaggatgggataaaagaagagtaaacacctcagcttacagctcagctcaggtgcagtaatagacacgtaggttgggaagctggcagctaccaattttattaagagattttttttttttctgtttgaagtacacacgattttaccaagataatactgaatggcgcacaccgtgtacttatccagtcatgctactaaggaggtatttataataaagctggatgacgtctcataaagatattttaagtatgagtggtgtgatatcaagatacctgacgttttagttgtatttggctgtttttaaaaattcttccacagcatgatatggcgagagaacagccagaaacaagtggttttgagctctggcatttacttactgtgtgatggtgatcaagttacttaacctctctggctttatttttttcctcaaaatcttattaaccaaaaaaaaaaaaaaaaaaaaaccaaacccgttgttgtcaaatcgattctgactcatagtgaccctatagggcagagtagaactgccccattgggtttccaaagagtggctggtggatttgaactgccgaccttttggttagcagctgagatcttaaccactgcaccaccagggctccagataatcttattagaccagatcatatccaaggtcttttccaacaatgaaatcccaggtttctatgaatttatatagtaattattcaaagatcatagaatcttaaattcttaagaggtgataaagaggattataatttagctttcatcataggacaaaaatcccttggacaaaattttgaacatatatggtactcacagttcctttcttcaagtctgtgagagggtcagccaactttggtgagaacccacagagcctcgctggctttgtttctctaaaccagacttagatgtaatctactgagcagagagaagcgtaacgaaagcagaatgaagtctcattaagatgaacatgaatgaaacgtcgggttatgaacagcaaagcttatttccatgttccaacagatggctaggaaaataacgtcttgtcgacctggttagagcaaattatatacaaggaagactctgatataatgcaagagcgtgtgtgcagtatttctgtacacatacacacatacaccagagtgtctcaacctcagcactgtcaacagtttggaccaggtaatactttgtggcgggaactgtctcctgcactgtaggatgtttagcagcacccctggcctctacccattctatgttattagcactctacacaccgcgtaccctcccccctcctggttttgacacaagaaacatctctaacaccaaacacaacccactaccatcgagttgattccaactcacagcaaccctatagcacagaatagagccgccccacagggttttgaaggctgtagtctttacggaagcagactaccacgtctttcttccatgtagcgacttgtgggtttgaatcactgacctttaggttagcagttaaacacttaaccactgccccaccagggctccttacaaagtctctagacattgccaaatgtcctctgggagggacatatacacacatacacttacgtgcatatatctatatatatatgcacatatacatcaacgacacaatacctctatttgcatggcacatccaatgttataaatgtatttgatagacatttagagttagaaaggattgggatcacaagtctaaccccatcattttatagctgaaggaaactctacctacctagacctaatgccgtcgatctagctcagagatattaaataatgactacctacccagcaactgtaatttatttttgttattagatgtaagaataccagcgctgaaagagatctcaagtacatcagagcagtctctatacaaaggaaactaggtctctacttttgtttttctttttctaaaagtaagccttccacccattacgttgattgtttgggtcgcttgttctgacagatcggatagaaactgaatgttaattttatcgttcaaagtggtataatctgttcccagtttactcaaatagacactttcctagagcatgttccctttgatcaagctagtggcaacaggttgagacagctccaggctcaggtctcacatctgctgagctccacttaggtcccatggcagggagagcacaattacctagtcaattgctctggaggggacatcatcttgaaaacatgaccaagttcataccattgtaattaatcagacaaccgctccggcgtgaaggcggttaacactccatagtcttggatctgtcttcttagcctgagaaagcactgctcactttaaggctgagctctatttacagaagtcccacatttggatgctaactggcaaaataacacccacgatgcaatcccacttaactgcttcatttttgggtggaaatccattaaataaacaacacgttaaatgaaataggatggtgtcagtacagtctactggctttagaaaaaataccgaaaatataaaaaccagcctcttcattttttttaacgcttcttagaattatggtcttttaaaaatgtagctttggggactgtcaagacaagactatgcaaagagcgttcactgcatgcaaatgtatatcaggcatctggaaagggctgcttgcaatctgcaaatgctagtacagttttcagccattacaacgttacatcatcttcacgtgtttgagagcacagagaagacttactcatccttctagctgacatgcatttgctttccaaaaccaaaggttcccattttctattagcttttgagccattagcttcacagcacctgagaattcctgaatttctgtgcatattggttttctggtgcttatcaacattcatatacaaaagcaattattgtaaatcacgatgataataaacttgattttaaaccatcagagtaaaaaaaaaaaaacttcacgtgtctgcattggaatgaagcgtttttaatctaagaaagtcaattattattcaaaggaaaattgctatttgattatgaaataaaacaatccaagagagaagaaggagtaaaggaagcgtttatcaggcactgagggaaaaagcgaaagaaggctgataggtcaggagtcagtgtccagttagaactcaactagcaatgcaagtctctggtaggtatcactgataaaggtcaaggggaacagagttatgacagtgaactttaaaaatactgacaggaaacaagagtacaggtttccacgtgcgttgccttgctattcacataaaatcattagtcccttcacagaaaggtttattgacttatacagacactcacttgtcaccctgtagagtgtattaaaagctccccaagtatttcgaatgtgctcagcaaatgtgtcttctcatctgttgcacagactgggatctgagccgtaaggcattttcagtgtgggggcttcatttaagaggaagtcagcaccttgacaaaggtgtaacctggagatccctccctaatgtcttactgagaaatgtgctctcactcttgatggacagtgatgaagggaacacagtgcactaagtacggaggaggttcacaaagtggagggacaagacacagtccttatcttgctcatctccatataatcccctggcttccctgcactttgccattttcatgtgttcatgactcaccgtgtaccaggctctgcattacatgtggaaggtggcacagagtgatggagaggactggtggctctgataccagcctacgtaggtgtgaattctggctccatcacttattagttaggagtccctgggtggcacaaacaattaagcacttgactactggctgagaggttggcggtttgaatctacccataggtgcctcggaagacaagcctggcagtctttttctgaaaggtcagtcttgaaaaactctatgatgtacagttccactctgcacacatggggttactatgagtcagaatcgactcgaaggcaactagtttgttttttttggttttataacttattagtgttcttactctgggtaagtcactctcactttttattgctcacttttctcatctctacaatgagggtaaaaggaccacaggttattgtatcaaatgagacaacacaagtaaaatactgaagaagatgcctggttcacagtaatcctagattatagaactgtgctgttcaatatggtagtcatttgccacatatggctatttaaatttaaattagtcaaaatgaaaaattcagctcctcaaccataccggccacatttcaaatgctcaatagccacatttggctagtggctaccgtactggacagcacagatacggacgatttcagcaatgcagaaagttctaccagctagcactattctagaagttgatattatttaaaaactttttattaactaatattttatatgcattatcattgaatctgaggcacagtgcccatgcctggtaaaaaattatttaatgtattgactcgagcaatatatgttgacagacctcaactcattacatttttattacattttttccttccaaatcatgttttcatctgtacctcgatttatcctcgcaatagccctgtgaggtaactatgttagacatctgtcatcttcatctcactgagagggaaacaggcagctatgggcagattatctatattcatatgagcagtgtctaccctttggagggtcttgagaataagaaacaaataagataaggaggtaactcaggaggaacaaaggttttcattttcctgattcaaaattaataagagtttattggagaaagcttgggaaatagacaaaagtatgaagaaaacagattcctcaaaattacgaaacccattaataaccaccaccacattaaggaattatttagttctagtttcccaagaattgaccagaagactttcagtctataagttactctagggtgtagtttgattttgtgtatcattttctaggggtataacatatatgttgtgtatatgttatacatacaaaaatatatacgttatatgtacaaaaatgtttttcatatatatacatacaaatacacacatacatatttgctgtactaaataaaatgagcatattacagttcatttattggaagataatttttctgctgaacataggctgaacattttctcctaaaattaaaaatgacttgataacatatttaattaatcacaagattctattatagggacatatgattatttaaccatttcccactttgctattaaaaataatgctgcaatgactgtgcttaaacacatatctcattttatagcataaactatttctttgggatggagctccagaaggaaaaatagtgggtgaaagttctagaactttcttacaggctcttgacacttattgccacattgccttccggaaaggctgtattgatttgcacgtccccaggaatagatatgagtgtctgtccctgccccttctccagctgtcattaataccatctaaacgttttgccaattttgcaggtgaaacatccttgttacttcattttttatttctttgattacacgtgaggtccaaaaaaatttttttcctgtgtttattttcttttctgtgagttgtctcttgacaccctttgcctattttcctgtcacagtgactatgttaggaattaagtcacaatgacttcatatattgaggacagcaacaattgtctaagctctttttttttttaattttgtttttgatgtttttatgttcgtaacttttaaatgtttatgaagtcaaaccagtctttttcctttgtgagtttcttcattgttttagaaagtccttttcatatcaaagagaaattaaatattcacttttgttttcctgatgtttaatcatgtttcatttctcttttttgtacactcgactctttaattcttatgggatttatattattctaggctgtcaggcaagcatgctattttctttccaaatagtggataaattgtcccaggatatttatagcatcagccttcttttccttgttgctgtgctgtgattcttttataactattaaattcttaaatgtagcaaggtctgttgaaggtgactaattttgttttattgctttagcgtatccagaaccagaaccacactgttttaggtacagtagctttataccattttaacatgttagagcatgccatccttgttattcctcttttctttcaaacatttcagggcttataatccatatgatctatggattcattttatgaagtccttcttctccaccagtatcccccctccaatccaataagatttttttttcttttaaaaatttcatttaatctttaaattactttgtgaaaaagccacagctttgtagtatttagcgttcccatccaggaatatggtatatctccttttaaaattctttttttttatttctctcagtaagttttgtagtattatttaattaggttttgcacttttctttaaatagtactttatgccatttattacaatcatacactgaatttccccccaattattttttaaaccataattcttcatttatagaaaaactactgatttttgtacactaatatctgaccactttactgtactttaattgattttaatgttcatgcaggttgattttcataggtttgtaatatatataatacttcagaataggtattaaaaaaaagaaaattcctcctttccagtagccatggttttatttctgattcacatattaaggaatgtggtagaatttctaagacattaactaagtatgctgattgctgacgctatggttcctgacttcggtttaatacttccagaatattttcctactgagagtgatattgcctaccagattaagatattctttatcctatcaggaaattatccgtttagttttaattttccaagagttttacgtgggaatgggtttggaactgactggaagattctcaacctataattttctctagagtgggatttggttttctttgttatatttgggtatttttctattttattctgatttctggactagctaatagaacaagagagttatctaatacttgaaattttacaagaacttgtctgtaagaccatctgactaaaaagactgacttctgatttaactaactgagagaaaaatgagctgttagtgaaaataacaacaaaattctagaaccagatggccagtctccagatgagggattacgctgtaaagaggggagtgtttgtgcacttgctgcatcaccctgtggaggcatggatcccccatctccacccaaaattgagttcagatgtcgagaccgatgatgccaaacccttaccaagaaagtatgaaaaggtttatcacttatataatgaggctttctggggagatcagggcagactcccatgcaggtccaaaaatagcatgagagagccagagcttacgtggtttgaacatcctgctggtaccaaaggagaggacacacgagttttcttatcaacttgcccacatgtgggacagaagggggaggaagagtggtggggcttggaagttgtcagcgaacatcaaaaatggagtcaaactccttattacaagagaactggatgagggaggagcagaggaacactgatctgatggtggagagggaaagcgtgaaaactgatgactatttacactcagagcacagggagcaacaaaacagtgacattcctccgcatatttaaaattgtatgacggaaaagggattcagggtacaaaagaaatttactttttgaccagttttactattttgaagaaaattttctaaatttataataagtactagaattgtgacttttgtcccatagtcaaaatacttgttattgaaatcccaaaagaatattttggaagatcagatccatagagggctttagcctttttcccagcattaggtttcacattttgggaaacagaattaccttgattataattgcaaaatccaaacgggagaggcctcctgtagccatccgtccctgaatcaatggggtataatgcatgcttattaataacgccaaaagctaacctttactgagaattcactgtgttccagatattgtgctaaacacttggcaggcattatcttatttaatcttccaaggcaactctattcgtagatactcttatgatcctcactttacagaggaggagaatgatgttccaagaggttaagtaatttggtcaagatcagaaagacagcaaataaggggccaagttttgaacccaggtccctttgactccaaactactactttcttttaaccactgggctacagtgaacgctttatctatgagcttcccttattaggctattgtggttcataatgtggggtctgaggtcattcaaattctaattctgccacttactagtaaattgagaaaatttagtatctgtaagttacagtttcctcatctataaaattaggatagtaattgtacctacttcccagactttgtgagagaattaaatgacataatcttaacctaggtgatgcagttggttatgcactccactgctgaccaaaaggtcagcagtttgaatgcaccagccactctgtgggagagagatgtggcaatctgctcccataaaaaaccccatgggacagttctactctgtcctataaggtcactagaagttggaatggacttgacagcaatgggtttagtacatgcctagcacatattatgcatttaatctaggctagctcttttaattagtaaggccataggtataaacatcaatttttacttatgagtagtgacacaatgtttagaacaaaacgtaaagaaatacagatacctaggaactgaaaaactgttttactcattctcggctctaaattcttatcaccgaatcaaagttaacggaaacgctggtggcgtactggttaaatgctacggctgctaaccaaaggagcggcagttcgaatccgccaggtgctccttggaaactctactgggcagttctactctgtcctatatggtcactaagagtcagaatcgactcaacggcactgggtttggttttttggtttaatcaaagttaggcatttgaggttggatatacatctttccaacttaaccttaatctttgcatagatggcgaaactgcttgaatatacgtgtctttaacttgagcatttaagaggttcaaatcaccagagcagcaaagcctctggtttacttcttgccaagaatttagagccttcagtttagccgagaggtacagaaactcctatcttaagatgcccagtttagctctgagaggctccctgttcacattctttttatttcatgagagaacagatacttctgactccacatgcgtgaagctgtcattggcacgtgcacctaagtaagaggcagtatgactgccccacatcaagcctctcagcacaggaaacacacctaggcggtgaaatgaacatccctttttatgtaattgttctttataaagcctttcactcaacagaggtttatttagtccaggcttttagacatataatagatgaaagcctggcccagaaagcagctcattctgtatctgaacatctctaattattattaattatttccttagattagattttcatctccaagtctttccttattaactttttaactttaagagatatatcaaggggcggggcacagcagctatgctacccctgcagggccaggacccacagaagcacacatagggagggtctcaagtgttgacaggacaatgccgtgtgcaacaaaggcaccaggcctgtctgctatggggcctaggctgactcctccctgcccaggacgggggaagctgaagctcacagaggggctgacttcaaaaaggacacagggcatacctggacaagtcaggaaatgaaatggccagatgaagcatgaaagttgaacttaaaaagcacaaaatgatatgtgtacaagatatctgcaggaagacccatctaactgcaagtcaatgaagcaggtatttcacaatgaagaggagcccctgcgatgtaataagtatggggaagatttcactaagagctcaactttgactcaacaggtgttaaatcacataggagttgttgttgttaggttttatcaagttggctccaactcatagcaaccccatgtacaacagaatgaaacattgcctggtctgtgccatccccacaatcattgtcatgcttgagcccattgttgcagccaccgtgtcagtccatctcactgaggatcttctcttttttgttgactctctaccaagcaagaggtccttctccagggactgatccctcctgatattatgtccaaagtacatgagatgaagtctcgtcatccttgcttctaaggaacattctggtcgtacttctttcaagacagatttgttcattcttttggcagcccatggtatattcaatattctttgctaacatcacaattcaaaggcatcaatttttcttctgtcttccttattcattgtccacctttcacatgcatataaggtgattaaaaaaactatggcttgggtcgggtgcaccttagtcttcaaggtgaaatctttactttttaatactttaaagaggtctattgcaacagatttggccaatgcaaagcatcatttgatttcttgactgctatatttgcaatgaatgtggaaaagccttcaattttcattcatcacttaatcaatatatgctaattcatgctgccagaaacaatataaatgctatcaatgtcagaaagccttcagacaatgctctaactttaaaaaccagaaaaccagacccattgctgttgagtcgattccgattcataacaaccctatggggcagagtagaactgccccatagggtttccaaggagtgcctggtggatttgaactgctgaccttttggttagcagccatagtcttgtccactatgtcaccagggctctgctctaaccttagacaacatgaaattactcacactggagaaaaaccatataaatgtcagccatgtaagaaagcctttagatgatattccgaccttagacgacatgaaataactcacatggaagagaaaccctatgtctgtaatcactgtggaagagtctttagtgactattcaaaccttcaacaacatgcacatattcacactggagagaaaccacaaatgtcagccaagtgggaaaaaacatttattcaaaattctcatcttagacaacatgaaagaactcacataggagagaaaccctatgtctgtaatcactgtggaagggcctatggtgactatttaaaccttcaacaacattaattcatttacactggagagaaaccatataaatgtcaaccatgtggggaagcatttaattaaagtactagccttccagaagatgtgagaagtcactctggagagaaaccttataaatacaatgaatgtggagaagccttcagatacagctctgaaatttatacacacaagagaattcacacgggggagataaaatatgtctgtcatcaacatggtagagtcatcagacagagctcttagctttatacacaccagagaactcacaaaaaggagaaatccagtttctgtaatacatgaggtacagccttcaccagaaatttcccattttaagctaccagagaattcacgtggagataaacactacttctataataactgtgtaagaactttcagctagagttccatcactgggatatagatgaaaactcagagtaggaataaaccctgaaaaggtaaagaaggaagatgggctttgctaagagtaggaagcagcttggggagcaccagataattcatgctgcagaaaaaattctttgaaataaatgtggaaatcctaccactcatggacaacacctgtaggacatgagagaattcccacatgtacaaaacactcccagtacaataaatgaatggaaagtcttcagtgatcactcattactaagtcagcagtaaagataccacattgatgagatactaaatctaaagtcaaagtggaaaagccttcacctgaagttcacatcagaaaactcatactgggaaaactctcaaaaaattttttagcatgcaattgagacaagaattcagatttctgttaaacgcttaattattataaatacacaccataaagatatagaatgttaaaatggttttagaaattatgaatataatatttggtaacaaagaacaaacgtgaagcaaaccacttcaacagatcagtattagcagatatgtagccactaacagctattgaaaaatctattatattggtatatatcttgtaaaaccatgaaacattttgctaaataataatgggccatttttcctttaatattctgctgccattgttgatcagttaggcactttattttaatgcacatctaaacatgattacgaaggttggggtcaatcagaaaatacctgtggaagctaggtacaaaaatgagaacacaatatgatgcatgtcctctatcatattaatgttaaatatttacatacatggcaatatgaatggaaacatggaaaaataaattttttgtgagtaaaaaaagatatattaaatatatatatgtatggacaatgcaaaaggaagacagaagaagaaatgatacattcaaattgtggtgttggtaaagaatactgaatatactgtggacttccagaagaaagaacaaatcagtcttaggagaaaaaccagaatgctcattagaaacaaggatggtttctaatgactttgacttgcttactttggacaagtcatcaggaaaggctaatggacagaaaaagacatcatatttgctagagggtcagtgaaaataaaggtaactctcaatgagatagattgccacaatagccataacaatggacttaaacatatgcatgatcaccaagatagcacagggctgagcaacatttcattctgttgtccataaggtcgccatgagtcagggctgacttgatggcaactaacaacaacgacaatatgtggtttcataagaaagctctttaaatacttgtagacctaaactatatcttcttaattcttctttgcccaagttaagtagcttgtgacctgagttctctttatctttttaatgacatggattttaggtaccttaccttttttttttttttcctaaatagttactctggcttgtcaatatctctcatgaagtgggtacctagaaatgaacacttaaagatgtggtcttcaaggggcagagcatagcaaggctaactacgttttttgaaaaggacattatcctcttactgaccaccctctgacagccttagcttttagcacacttatactgagctgatcctgagctactttcacaagtttttcttttaatactaattgcttttaagccatcatatttaataaattgacttttcaagccaaaaggctgttaaattttaccttgtttgttacagctcgctcttccatgatattaaggtaacagaatatttagaattctgactttgacaaaatcatattttcagcttatattatttatatattaaaagcttgccttataatcttcttgtgattaatattataggatgagtaacgtagctctaaagatgtagccttatggaaaattctggaaagaggtccctagttgattagtcacctacccggctggacagtggttaagagctcggctactaactgaaaaaatgtctgcagtttgaatccaccagccactccttggaaaccctatggggcagttctaccctgtagtatagtattactatgagtcggaatctacttgatgacagcagtgggttttggattttctgtgtacaataggtaagctgcttatgaatctatccaactgcatgatccaccaatatacatttcttcatcctctttgaatggcagcacacatcaggtaatcagaagccttgctgagatcctgatgggaatgaattacagcagtttaatgtctaatttttttaaaaaaactttatttaaaaaagaaaatagcttatttttactgagtccatgctacagcttagtgatcatgtctttttatttgcgcctttctagaaagttcccaggcaccaatctcaagcttcctgtactacagtttccagaagacctttttttttttttttcctttataaaagtgagaactgtatttttccacttttggccctttagcttatctcctatatgccatttctttggatattatcaacagtggttctgggaaaacatccagtacttcgaatgtaatttatctgggctgggggctgatgagtcatctagagtagctaactgctcatattctatctcttcaccaactctgggcatcaatttaccccttgggacaattagtccatccttcccaatgtcaggaacccgttatagagaatacagatagaaaacaagagaggctagctttgttatttgctgctcctgctgctgcaattgctcccgttttcatgatgcaaccataatttccaagtggttgaggaactacatatgcttttccttcttagaaggataatagtagtagcgaggtttttaaaagcacttatactatgtgctttgttgctgttcctagttgctgttgagttgactccaactcatggagatcctatgtgtgcagagtagaactccacaggtcacaaggctgtgaccttttggaagcagattgtcaaatctgccttctgatgcacctctgagtgagtttaaaccatcaaccttttggctagtagtcgatcacttaactgtttgcgacatactatgtgccaggctctgttaaatgcttgaagcatctcatttaatatttacatagccctatgatggaaataccattattagtcccaccttatggatgagaaaactgacaattgaagcagttaaataacttgcccagggcccagttagtaaaggtgggtagttgatagtcaaaccaaggtgcttctgataccaggaacaataatattaaccagtatgctacattgcagcccatttttaaaacataaatttggttaaaattctaattttttggtaattcttggtccactactgactttagtaaagagatctggtagtgcaatggttaagcttttggctgctgacagcaaagtcagcagtttgaacccaacaagcactccatgggaaaaaagaactgatattctgcttccataaagattatggcctatgaaacactacttggcagttctactctgtcctacagggtcattatgagttggaatcgactcaacaacacacaacaataatgactaagatttaatgacgatatttcaaatttgtgcctttcttttcttagttaacagtctttgttcttttacaacctaaacttaaacctttttctagcaaaagtccgtgtcctttaacaacctaacttttatcaatgaacttccgtgtgataatataattctatttaaatatctcactgtgaccttcccttttgtcctacagtgatgtaaaaggcttgtttgtgtgcgcgcacacacacacacaaacgctggagctgttttctaatcacctcccacgtacatgaacaccctgccctttcccccgtcaagtggatgccagtaagtggagaaaaggtgctgtttccatcctaaagacataaggtgttcctgaagcacaaaaagtacaaagatttattattccctgaaaggctattagacacagctgctcaactcccagctgactgctgtatacctgggttgctgattattggccctctaagctgcctgacagctgccctttgctgcttcttgcttggtttggaggcatggccgcagtgtctgcctgaatgagccggtgagcacgggctgtttgtagaaagcaccaaattgactcatacaaggcaactggtacaatagccgtattaggaaacagtttcggtagctacccattccacagagtcctacctctcaaattcttctgcagtcaaaacactgccctgacgtgactatgaggtagtgctggaagtgtccaggcaggctggggggcctccaacaggatcacacaaaggctgctctgcctgcagtcagccaatctccttctgctgcacagtggccttaacaaaaggtcaccaaggaggcagagccaagatggcggagtagtcacaggcttcctgtggtccctcttataacaaagacccaaaaaaacacgtgaatcgattatatatgacaaattaggagccatgaatatcaaaggcaaagttgaggaattagactgagcagcaggggagggagagatggttcagaagcagtgaggagttgccagacctgacccagctggaactggtaccctgcaggccggatcagctgtgtgcagctaggcaagcattcacgttccggatgcattttctacatggggagagaccgagcagtgaagggtctattcacacctctagaaccagtgaaaagcagcgcttattcaggaagagggaagtacatgcgtctaacctactgcgttgattaaaaaacattcctttgggaaaaacctctctcccatttacctgatgcctccccactcttcagcaggtccctagctggcttcagagattgctgcttccccaggccagaagtaggacctgtcacatgtcctgagccattctcccggtcatggagaggaaacaaattaacaatcaggaaaaaataatctgccggctcctctaagctgggaactcagggcagaaatggctcccttgcctagcataggcataaggggtccacagactttgaatgcctttcaccactgcatagacctgtgtgggcccatttcaacagcgtaggccctcattagcacagtacaacagggtatatacttgaagcctaacttcaactatatcagctatagctggtagagaggcaggttcatgacatttgatgccactttgcatattaaacagggtcctcacccacccacatcaggctcttgaggactggtggttccatcaagtcacctagccacctgtgacaggggtccaagaataagtggcgcctcccagtcctcacagccaacagcattgggtgcccattgtctggctgcaaaacctacccacctacacactgtagggaacagggacgcactttcctcacagactttcaggggctgctctcaggcccctgccttgctcagcacatgaccccctactgcagccagatacctgtgcctacaccaatcacccctgcccatctaggactgtaggtgagagcctacactacacacttggtgactgacaacctggacacctgagctgaatctgtacaagaaaagtaagtggactcctgggcacacatacctagtaacagatctaaccacctggtgacagaacatcagagcttcaaatgcaccaataatcaaactagatcacataagcagcctatttggttgtgtcaagacaaaacaaaataagaagctaggacacaggaagcaaacataaaataaataaatataataacttattgatggctcagagacaacagtcaatatccaatcacataaagaggcagaccatgatggcttcagcaagctcccaaaacaaagaatcaagaaatcttctggatgaagataacctcctggaattgctggaggtaggctaaaaaagattaatatacagaactcttcaagagatcaggaaagagatcagataaaatgcagaaaaagccaaggaacatataggtggagcaacagaggaaacttaagaagattatagaaaaacataatgacaaatttaacaggtggcacaaatccataaagagacagcaaacagaaatccagaagattaacaataaagttttagaattagacaactcaatagaaagtcacaggagcagaattgaggcaatggaagtcagaattagtgagactgaagataaagcacttgacaccaacttctctgaggaaaaatcagattaaaaaattaaaaaaaaatgaagaaaccctaagaattatgtgggactctatcaagaggaataacctatgagtgactggagtaccagaatgggctgggggaggggcgtggataacagaaaatacaaagggaattgttgaagatctgttggcagaaaacgtgatacagtgacagatgggaagatatcgatccaagatgctcatcgaatgcttcataaaacagattccaaaagaaagtcaccgaaacatattacaatcaaacttgccaggaccaaagataaagagaaaattttaagaacagataaggataaatgaaaagtcatctacaaaagacagtcaataagactaaggttggactactcagcagaaatcatgcaggcaagaaggcaatgggatgacatacataaagtcttgagggaaaaaaattgccagccaagaattatatatccagcaaaactgtctctctcaagtatgatggcaaaattagggcatttccagataaacagaagtttagggaatttgcaaaaaccaaaccaaaattacaagaaatactaaagggagtcctccagtttgaaaatcagtaacatgagataacaacccaacgctagaacacaggacagagcaaccagatatggaaatcacaaaaataaatagaagccaaagcaccgaaaatagggaaacagagatgttattatgtaaaagatgacagcataaaaacaaaaaagtgggactgaaaaatgtagtcatagatctttcatatggagaggaagtcaaggcaatataaagaaaggactgctttaaacttagaaaaataggggtaaatattaaggtaaccacaaagggaactaacaatcctacacatcaaaataaaatacaagaaaaacatagactcagcaaatatataatcaacaatgatgaaaatacattaaaaaaagaaaaaactcagcacagaaaatttagtggaacaaagaaactgtcaaaaacacacacaaaaaaatacatcaaaatgacagcactgaactcatacctatcaataattatgccgaatataaatggactaaacgcaccaacaaatagagtatggcagaatagattaaaaaaaaaaaaaaacaggatccatctatatgctgcctacaagagacataccttagacttaaagatacaaactaaaactcaaaggatggaaaaaatatatcaagcaaacaatcaaaaaagagcaggagtgacaatattaatttttgacaaaataagactttaaagtagaatccaccacaaaggataaggattattctttgtggtggattttataatgattaaagggtcaatataccggaggacataagcaccataaatatttacatacccgatgacagagctccatgctttcaaatgaagaccccattataagacactgaatcaagatggtgcaaacggttaagcacttggctactaaccaaaagttgtcagttcgaatctaccctgaggcactctggagcaaagtccttgcgatctccacttctgcaaaatcagtcactgaaaaccctatggagcaaaggtctactctgaaacacatggggccaccacgagttggaaacaactccatggcagctggtttggttttggttttatggcccacattccattttcaggaccttccgtccttgtagatggtgggtgttccccttcaagagtccctccaggacatcatagttattttatctgtgagcatttagataccttatgtggtgcaaataattacttttatgtatggcctttctagctatggccttgtaactgccacccaggtgattgtgtgacagggtaactgcggcccaccaaggggtttggtcacttttgccttaaaagagagccaattccagggcagagaggaggatcctaccaacaccaaggaagaatggccaggagcggagaacgcatcctttggacccaggatccctgtgctgcgaagatcctcgaggcaggagaccgagagagcaagctgtaaccctgaagacagtaagaaactgtggcaggtgaaacccacagcaggagatggtgcaatgggcttcccggcccacaaagagagaaaatcgagtgcctttgggcagagattgagggccagggagaggcctgccttcgagcacagctgggaagaggctgtcctgacagaagaactgtatcctgagtgttcttgagcctgaactgtaattgttacttccctaataaaccccataattgtgagtatggactgtgagttctgtgtggccattgcaatgaattatcgaacccagcagagagtgctttgggagggactgttggtggcagaattggtggagacggtggagagaggtggcttaacctccacctcttggaatcagccttgggctgttgatcttggttctccttcccccttgtgaagttaaaggaggtcagacactgcccccaagccactttacaactcatttcttaaagaataaaaatttggtgccatggagtcgattctgaatcacagtgaccctataggacagaatagaactgccccatagggtttccaaggatggctggtggattggaactgccaaactgttggttagcagtcttagctcttacctactttgccaccaggactccaaggttacaaaaaaccaactactgccctgctttccattgttcctatgatgccgattctcttcttgcatttcccctcacttcaaatctggaatctggtccttcctgatgatcaggattaagttcacagtagctgaccccctcactgctccctctgctcgtaaaaacccagagcccagtacagcggggaaattacctcctgggcaagtcaagaatttatcagatactctgcttccggcagcttgacgctttcagtaggtgcccagataggtgaaatgccacataactccatcaaggtggcccttttcaaatcagaccagattagtcatcctcccctcatactctgactttagtcttccctctcgtcccccctggtgtgcactccaaaactatgtaaaactggattctgaatgtaactatacaaatttctagtgtgctttcaaagctgccctttatccctacagaatattagaaaatactcagtttttaacaaccctataatatattgtccttaagtaaactactgtggttgctttcctagacttgagacttggagttgggctatacccggggatggtagctgtattattaacagggacagctctcgtttactgattacgcactatgtcccaagcaactaacatcacagttagtctacaaagaaaatctgtggtaatcatgcaaacccaactcacaaattaaaaaagaaaggaaaaaaaaaaaaagtctacaccaaatatagtcagacacaggctctatttagccagacggcctgggcactatatattagctgtgtgatcttgggcaagattctcaacctctctgtgcatcagtgtcctcgtgtataagctggagataagaacagctactgctaaggttttcatgaagagaaagtaagaggtgaagagttctcagaacatgtccgttacacagctggctcttaataaatattagctgtcatttttatttgtaaaccagtgcttttcccacaagggccagtcctgtgtattatagatatgaacggtcattttgggggtgtaagtttatggaggctctgaactaggtcttgtggatttgcttcctaccacaatgctgacaagaatgccttgtacctcaccagcttataataagcatttgttgaacaaatgtttgaataaataagccttcaatttttaatatatccatgtttggaaatgccccaaaagaacagggctggatagagaaaattctcatcataattctccattctctccatcctccgttagcatacatatcgtcttcttcaatttacaagtaaacttgaaaaataatggaattcagatttatttatggaaatgagtttgcttcttcatttagcccagcaggcccagttggtaatatttaccaaggggtccttttaagatcctttaagtaaacatatagttaaaactcacatcagtttaatagtacaccttgaaaaataagcataaaagccttaattgcctttttcctggcctacctacatcaatacctacacataaaatgcagactgaataacagcagtcaaccaaattcctgtcaaatagcacatctgtgtgaatactagctgtccattatgttccttaaaatctatgaggctgaatcatatttgtgggaaaaaacagctttttaataaaatttaaaaggcttaattcttgtggagggggaaaaaacccacagtaacgttcctttttcttttcaattaatacaaaagcttcgcacatgcttcaagacagtaacaattttatgttaatataacttattatgtagtctttattatgtaaaattatagaagaaaataatcaactataaaatatgagaaatacagtataggagatttgaggaattataaccgattttctttttcaggtagaagtttacaattcccaaagtaaatttctgaggtctctgattattttctttttacaaaactaacatgaagtcataataacgttactatgcatgtcagtgactcttttcatataggacccaatgttttctaccggaatacaacgtaaatttgagttggcttcggctctgttgattcctgggtgagctacaaaaataccctgcactggtgtcaggagagctgagtcctagagttaattctactagtaagtaggtgtaaccttgcatgtgcctcttctttattcctcagttttcataaattaaagggaacagagttatctgaaagtttaaaaacaccccctaccacatacatacatataccaacctcactccagacttcctggaaactaaatgctggggtggggtggggcaggaaagctgtattttcacagagaacccaaggcctgtgatacacagccaggtttagggacatctgaattctatgatcactgaagttactcacagctttacgatctgtgcgtttcactctctgtaaattttacctcaattaaaaaaaagtcatagttttgtggctgtgatgggtcactgagaagtgaatgctaccccaggccatggggtaaaagaatctatcccaggagaaagtgttacatccctgtggttcgtcattggagcaacactgctgtgctaccccggaaaaacaatttggtcctattccaagtgttcctaatggccatgtaagatggtaccagaattcagccaggtatcaagtaaagctatggccaaaaaatgttataccataccttgcatttcagcaattatgttctcagaatttccctaaggacacaactggagatgtgcacaaaagacttagccagaagggtgctaatgctgtgacgtaggcgataagcctaagtcaggatgcagcacctggcaggtccgtgggacttgtggccagtggctgctctggcatctctgcctgggtttatattcaaggggaaggaagtctgaaaggtgagaagtagaatatccctcagttgtattagaaaaggagaggggccatggtgtgtgttgcacaggctcaccagtgtgattcctgtagagaagggagcagaaggccaaagcgatggggctgtggtgttcacacaggactgggaattccctgctttagtctccagagtgccactccagagcccaagtgcgaaagcagtgttcctaccattgttttctatgggaaagaaggtgagagcaaagcaataggagctaaattttgggagcatagaacacagcctactgggtttggtatcagggcccctggggatgtacgtggagcagtggcagcacaaagaggtcttccctaaactgcttccagactgggtgtgggcaagtcagttagaaaatgggagatgtttttatgattatatatatgaacttcttggaaacttctgaaataactgagaagcagtttcatgtggggaagggagagctaaggttctacatcagatggggcaagaggtaggtaggcgtagagaggcaagacagccagcaacctttgggttcttaatgtgacctaatctgaacccacaggcagatgagttagggagatgtggggaatatatttataatacagcaacactaaaaacaaataaaatgcccaacaatagaggacagggaattagttaagtgaatggtacatccatgcattgtgaggcagggttatgactcaaagaatgaatgtatttattttctgtatatttcacagccctggagtgacatataccctgagtggtaccaagagttaatgtgctcgctgttaactgaaacgttagaggtttaagtccacccagaggcatctcagaagaaaagtctggtgacctattttttgaaaaaaatcagccattgaaaaccctatagaacacagttctactctgacacacatggcgttgctatgagtcagtcacgttggcagcaactggtttaccacgttctcactgttgcctcaagggtacccctagatctcattgagcagaggtcagcttagagaaattgactgctaaagtgaaagacagaaatattcatgtttgtagagcccacctctttttttttttttttatcagcgacaagatgagaaagactgatgctgaagaaaaagtgggccaatcaggaggaccctgtacgtcttgactgggattaggaacttccctatgcagagatgaccatagaattggtgactaaaattggtcacatagaggaaagaaggtgacaaccggatgagtaactgggacttcagtaccctacttaagcatggggctggtgaacccaccaccatcattacaaatggattactacgcaaacactgaagtgatagtgtaaaacacccatcgtgacatagaaatgctccactgtggcattataaaaaatcttgttacgatatagtaagccctgtgtgagtccattaaaacaggagtattcctagaaaagagcggctggcagtctggatgccgataacaatgattatttctgggtaattgtgtacaacccacccaaaaccaaacccactgccatcgagtcaattccgactcatagtgaccgctatgaattgtagacaaggacatttaaattctgtagtctccaagtgttctattaatggacatgcataacttgcaaaatcaaagtttatataaaaatgtgaaagaaagtaaattggggccaaaagtacagtttatacgtggcattacttacttctggaatcctacttctaggctgcatttgcaatcattgctgctgttttttcagtggactcaaattgtaattttctcaagggcatgatctgtatcttatttcatctttttacttcttcagaggggttgggataacaccagtttgtagtctggatataggttagcaggtggcctccttcctggagtaatcaaatcgaaacattctgttttaggtcttcattttctaatgtaaatttatggaaccacgagactggagtgggctcggtaacagagacaactaagatttatggaatgagttccatgtgcctatgtgccagccactgttctaagctcttcacatgcattatttaatcctcaccatgactgtatgaaataggaactcttaccatccttgttttatagatgagaaagctgagggacaaaaatgtgtactgacttgtccaaggtaactaaaaatatataacctgccctcaattcttggtggtccttatgagactagtaaaccgctctttaaaaacaaaacaaaacaaaaaagcccattgcctttgagtcgattctgacccatagtaaccctatagaacagggtagaactgccccatagggtttccaaggagcagctggtagatttgaactgctgaccgttcggttagcagctgaacacttaaccaccattccaccaggactccttagtcttaactgatccttagtcttacagaaaaaggacttataagtggatttcagtgatgtgttaagatttcagaaaatagctactttttaactttagtatataccttctgttaactcatttacaagacatataccttttatttcccatggtaaataacttataaatacgtttttctgttatacacaaaaaggcattaagatgatagctcagaggttcaggtactgcagccctttaactgccaggatgtgtgattttggcttgtccttcaaacctgctgggaaggtttgctcatgtcttgcaaaaatttgatgacgtttactaaagacatccagaactcttttctgctttaaaattcataattctatgattctatttttagttgttgatcaatctgaagaacaaatatatactaggtaagcacaggacagagtactaatcaatagtctgtgatttgacttgctctggtgacgcagtggttaagaactacggttgctaaccaaaaggttgacagtttgaatccaccagtcactccttggaaaccctatgaggcagttctactctgtcttatagggtcgctatgagttggaattgactcaatggcaacaaatttggctttggctttgacttggctctagataagagaattgcagaagtatctgtgcccactggccgatgtggggcttaaatgaccagcgcctgtgggctcctcatcaagaaggtctaagcacaggcccacaactgaccccttttaacatgtctttgggcttcacaccataagatttccctccagttactctgttaaaccaaaaaaccaaaaccaaacccagtgcttcgagctgattccgactcatagcaaccctataggacagagtagaactgcctcatagagtttccaaggagtacctggtggattcaaactgccgaccctttggttagtagccgtagcacttaaccactacaccaccagggtttactctactctaaatcccacctacatcatttcttaaatttagtttctctgggaatcgccctctcactcggaaggatgaccaatttaaattatttttaaatcatcacattaagcattagctaccactggctgcaaggggagccaaagaagtatattataccaagtcttaaaacgctgtccagcactttttaattttatcataaaaatcacagatagctattttatcatgagggatttaataagtttaccttttaaactaatggactataatgggtttcttttaaattttgcatgtaaaaacccctgggttgggaaactttcaatttctccttaataactcatgactataaatcaaattcctttaatacactacacactaacgttgcaaagagcttagacggaaaccatgccattttctttctgatgtttcagccacaaggaaaggctggtttatttctgaaaggtagtactcaaagcaatttcattttatttccctccacagaagatatcagatatttacgcattcccataaaagatctacccttaggtattgctgaatgacctgcttcttggagatttcactggtttctctcttgccagagaagaattttaaagggaaataggttttaagtctggcatggtacatccagtgtatatttcatagtataataatggcttttttcatagccagtagttaaatattaatagtagaacacatttattggaccatttcccttccaattaaaatgtaacactaataattataatggtgatgacattattatatcaataatgataatggccatgctattataaaataacaatattgacttattttttggacctcctccaaagctttgtatttctccagatttctaaaacaagaaagaaaaggacgataaagtacaagttgatttgaaggtcattataacgtaaatgacaatgctttctgatcccacttgtttgtgcccctgatcttcctaaacatttaagcctagagatatgatactacaattaaatatcccagaccaacagtgtggaatctaagacacaaagtccatcattagctagaaggacatttactgaaatatatagactactagagagggtcttctcattcttaaatatccttaaagattccaagtttagaaatcgccataaaaaaaagtgcttcctgaatattgcataattaatcacattctggtgcctaaaggtctccatacaggaaagggtctccacaatgacaaatattaggatgaaaactcaaagatgttttttaaaaaaaaaacttgtatgttttcaaacatccgatatcaaacaaaacaaagatattctcccatccattcagagagttggcatgatgttaagtcatgaatgatctggcttaattccttctttaacaaataatctattgtttcatttcttgggtcaacaatctaaagtcaaagtgggaaatgaaaattgtccaaatttctttgtataattttagctaatacaataattcacatggtgtcttggttatctagtgctgctataatagaaataccacaagtgggtggctttaacaaagagaagtttattttctcacagtaaggtaggctaaaagtccaaattcagggtgtcagcttcaggctttctctctctgttggctttctcatgaatctttccctggactaggagcttctctgtgcaggggatcccaggttcaaaggacacgctctgcccctggggtgctgctttctcggtggtatgaagtccccctctctgctagcttccctttccttttatctcctgagagataaaaggtgatgcagtccacacctcgggggaaactccttttacattggatcaggaatgtgacctggtaagggtattacaatccctccctaatcgtctttaacataaaattacaatcacaaaatggaagacaacacacgatactgggaatcatggcctaaccaagttgatacagacattttggggagacacaattcagtccacgacatatggcaaaaccgatgtgcagtgacaagaatggaagcagatttacatgtctggtcagactgttgagatagtcttcttagcctaggggctggggaagggagagaaaactgcatttacagatacagaactcctgcatggtgtttacttcagctacaaattcatcaactaccaacgatgctgagctgttgagattgtaacacagcatgtaatggaaggacatgcaggagcaaagccttggcacgggatgtttttgtctcttctcctttgatgatgtgttctacacggtggcccacacagcccgtagagcctgagcacctggagagaaggctaggtgggcactgtgctgatgggagtccttcactgaacacacaccatgcaaactggctaaacactatcagaccaggaaactaatgaaaacaccagtcataggattaagtgcacaacatttgatgccaaatctacaggaggataatggcataccttgtgaaacaggtatactcgaccttaaagaaatcagatcagagtcaatagacaggaggagaagggagagatagagggcaggaaagaagaaagaaagaaatagaaggcaaaaaaaaaaaaaaaagcaaaacacaaatgaagaaacagggaagaaataaggcgaggggagacagaagacataatctctagcagatgtattgcacatactctccagtactatgtgccatctctggggaaacatatgtgaaatacagacatttgtcttgaagtcattgaccctgaccctagacctgagtctaacttatctcccatgcagctcccttagacagatgcgtggtggtttgtaaggtttgcactgaccaatttttttcagaagtagacctctaggtcgttcttcccagtctatcttactctggaaccaacttgacggcatctaacgacaacaacaacagcagctccctcatgggcaagaaatatctgcaaaattttggagagaagtcaagccctattgtatctccctattttatattccaagaagcaggaaagatgctcttgtggcctaggtgccgctgctggttgcgatgaaggtcaatgtaaagtccgagcagcaggcacactgttccttggccactgcctgcatacctagctgtacccaactaggcgctccacatggctatcccccatgattataataggctatttactgacttttttcttttgaattaaattcctgatgctaagtcataggaggaggctttgtgtggtatatctacactggctctgtattcaggcaattcattccccagtttcaccacttatgtgctgtgtgaccttggggcaggttgcctaccctttctgaagctcagtttttaataggtaggaataatagcacacacctcagaggaagtgtcctctttcccttttgctctcacatgctagaaccattctcagttgttcttcctgatctatgtaataagcgctatcgataggtttagcactgtaaaaagtcaggcaaataaaaatgcgtcctcttttgttaatgaattcccttacaaaaagggaacctgaggggaaggagcagggccaggacttaagaaagtctttaaaaatcagtgcatgcctgtggatgccattcatcgactttccatagtgtggaaactgactctagggtctacacaccatgttccattaagagatggttgctgaccactcttttggaaggaagaactatgctgttcctcaggggctgggtccttttaccccctcattagtgcaggatgcatattttacttctctattccccttttttaaaaatttattggtgatcccacccgtgtgtgatcctgatcttcctgtaacatttaagcctatatatgtgaccaaaacccaaaatccgttgctgttgagttgattctgactcatagcgaccctacaggacagagtagaactgcgccatagggtttccaaggtgcattcaaactgccgacttttcggttagcagctgaatgcttaaccactgtgccactggggctccagaagtgtaatactacaattaaatatcccagaccaaaagtgtggaatctaatatgcaaagtccatcgccagctactgaaatatacagactattggagaaggtcttcccattcttaaatacctccctggcttttctcatcttcacacaaggctttatctgccattcccaagtcaatgaatccccaaaagaaatctcataggaactttatgtaccaagctgaactctttatttgtctccccatcctcctctgttattcaggagccaggaagcaggttataattctcgacacttctttcttgttcgaccccccatctaatcatgctgcaagccctgtagattctgcccttctaacatttctcaaacacgtgtcactcactccattctcattgaaattactcgtattttctttaatgtattataaacaggttcctcagattcctggatagctttacactgcattccccagcaagtatttattgagtttccagccaggttccggaaatatgcaagataatgagccagaccccctgtcctcatggtgcatccgggggaatcaaacaactaaaccatccactgcgatgctgttatgatgctcagtacgtggtggtatgagcctgcatgggagggatgcctaacctagtcttggtgggtcatggaaggcctccaagaggaagtagcacctaagctgtaacctaagtgcaggtgttagccaggtgtagaggcagttgatgtttactaggccaacatccattcatactcttgaggaagcagcaccctgactttctaggaacctcttctcctacactacaactctgcacacttacggtttgtttggagctgactcgaacacaacacccctcccaatcttccagggtgagaatatgacacaggcctggccattcaggacattccactcccatggcctcattaattgtttcagaggtggatccacgactccagcggagctaacatcagggctttttgatgagagatgcttgctttccactaatgtggctgagagagcaaggtgtaggcctggaaatactggctactattttgccaccacgtgatgagagcctgcctgagaagacagtggagagacatcgagagagggagctccaatcctgatggcattgtctgagttcctgaatacagttgtgcagggcactgcttttgagcaaatacatgccctaatggtttaagccagtttgagttgggttttctgccattttctactaagagttctgagtaatatacaccaaggaggaaaaacatgttctagatagagggaattatatatgccaaagcccagaggctaagaaatcatggtccattcggtgcagtgcacatagatatgtgagaccagagggcaggtgtgaggaatgacttgtagaagaggctaagaaggttaaccgccaacctttttcaatccagtcttaactctgcagagacactgtcattaaatgcaaatttcattgtgcaattcctctccctgtttagaataattcaacgacagacagcaaaggttttaggacaaagttcaaatccactagcttgacacccaagggcaaggctcttgatgatctgactcctacttctctttggtttcctctctcacatttctcccaagggtaccctgtgctctagctaaactgaactatttgtagttttccaaacatgtcatgctgtttcagacctttgtgcctttctactgaatgtactgcatcatttaatccccatgagagccccatgaagtggtcattattaccctgattttccagatgcagaaacaaaagtatagagaagtttttaccagttgccattgaatcagcttctgctcatcacgaccccatgtgtgtcagaagtagaactatactctatagggtttttaatgactgtgatctttcagaagtagatttccaagtctttcttcccaggtatctctgggtggacttgaaccatcaatctttcagttagtactgcaatgcttaacaatttccaccatccagggactcctgtagggatattaaggaacaccaagagtcatacagtcaataggaaggagagctggggtttagatatctgatacccaagctcttgctctttcttctgccatactcatcccagctctcttatattccacgccttgtctttcgatgaaacaagtaaaatctcaggggtggggattggagggctccttacccatcaatttacactcttggtacctaaaagggaacccggtggcacagtggtaaagagctcagctgctaaacgcaaggtcggccgttcgaactcacaagctgctctgagggagaaagatgtggcagtctgcttatgtaaaggttacagtcttggaaatgctataaggcagttctactctgtcctatggggtcactagaagaaggaattgactcaacggcaacaggtttggttggacacctaaaatgaacacaactgcattgtaatcattcagtccacaaacatttttggggcatctcctttgaaccaggcacagtgttgggtgatggtgtgccgcagtaaacaaagccagccactgttcttaccttcatggtgcttgtagtataataatctactcctcaagctggattctgattaagaaggcttcctggctacaaatgagaattaatgatattttctttttattcacacatggaactccatcattgctactgaagaaatatcatcagctgaggaaataataactgaggaaatatcaaccactgcccatgtgttatatcagaggtgaactgatctactacatgggaaaacgtggagaatataccaggaataaatcagtgaaggaaagggtgtgctgtgtcttacgtacctgggatcaattgcgttacagcttactcagccaggctccaaattgcaaaacagcaggcttgcaaggggtcatgaacagggaaaatcactgacttaatgacatctgaaattttcattgccttatttacaccctatttctcactaaagtggataacatttcttaatggcaccaattctgtaggctcacgaactaggaatgtttccttctaatttagacaaaactgattgccacccaataggctctcggcaaagaatgaaaaaaagtaaggacaaaaaaagaaagaaagaaggaatgcataccacaaatcaggcatcaagaatccagcgaaaataaaagagcagtttcattttgcattagggtccgatctcttaaaggtactgctagaaaatctaatgactatttttataaatcttatttggtagaaaaagcaaatggagttatggcagaaaaagtgaatggagttatgacaaaaattataataaaaaataagagaaatgaaaaattacagaggaaatttgatttccaatatcagaaaagcaccttttgggaacataagaaggtagcagtccctcctcccccaggaaaagctggacgagccctgacagactcaaagctgtggacattagcccagtttgccgaatgagaagcaattaaggtgacacgggatgtcaaccgagcagctgtgtcccatgaccagtgggtgagtgatctcgctgggcacacagggtctgtggaagcaagggaatgcagtgtccagagaaggcccccttggtggggagacccacacacacctcagctgcccgtcctaggcaagggttttctgccctgaaaatgctatgccaataggagatgttctcagagtagaagaaaatcatcatctcacccaggagaaagacaatttttttgttttgttttttaaaataactgcacaccacacatacatacgtgttaccatggagtcaattccaactcacagtgagcctaaaggacagagcagaactgccccatatggtttccaaggagcacccgttggactcgagctggcgacctgttggttagcagctgtagcttagccactacaccaccagggttttgaagtaactgccgtggccatcaaaagcaggcttgtttttcttaggctacaccctgggctcataaaatagtttcaggatctcaaaaaggctaggttgtggattgaagtttgggtgtaagcagccaaccagaagtgaggatggctgaaaagattaaatttgaagaagattccaaatccaaagatgaaggaaatataagacatcaccaagaggttcccgacttcggtgttatgcattttaaccatatttattcaatactaatgcagcgtgtcaaatcctaaactactattcttaattattttaaaatcacatgaaatttcttcttaacatacaaacaggcatcatatgtggaaggcaaacttaaaacagctagtccaggttaatcccttagcatgggctagattatgaaaggtttaaatgataactaatcccaaagggttacatatacatcagggattttatctgactaagcttagtaattatttgagagttaaccagagtggcttaagaggctgcaaaacccatgccaaatcacattaaattacacaagagttaaaaggcctgacctggactgaagcattaacataaaaaataccacaaaataatttcattacagagttaggaatatggaattgatcaccatagatttttaaaaagaaaggagaaaaatggagatttaataaaaacaagataggggcaaggtggcatgttgggattctggatatgtcttgcatcttagatccccaccaaaccaaaaaaaaatctgttgccactgagttgattccaactcacagggacccaataggacatggtagaactgccccacagggtttccatggagtgcctggtgtatttgaactgctgacctcttggttagtagctgtagctcttaaccactatgctactacagtttcccagatccccacagagactgctatcttaaacatagttgatatttgctacttttcctgttgttagttaacctcaagtttattctggctcatggtgacccaatgcgtgtggagtacaacagtggtccataaggttttcaaggcctttcgagaacagatcaccaggtctttcttccaaggcacttcttggtgggttcaaaccaccaacctttcagttattagtcaagtgcttagttgtttgtgctacccagggactccttcgctacttttggagggtagataattctggtctaaaggctgtcttttacagatgaggaagttaatttgctgatagtgacacaggtcagctataatgagttctaaaatacagaactttttattaaattagaataaactgtgctgaatgaccaactgcttctttgcacctatactaagtaatattactccgcagttgacaggttttccttaaccaagacatggtttgagaatttgctgaactctgaacaactctgtctatatatatttgagataaaccaagagataaataatagtaaggacacatatacttgtcttgtaaggcgcttcatagttttttgttacttgctgaaaatctcaaatgggcaaagagggtaacaaaccagatgtgttaacatctaaaccatctgactaccaagcgttaggctcttgtcagtataataacctccatgctttaaacaatatactgggttttatccactaagaagtaaagtcacagggatcaccaagaccagtctacctactacaatccctttgctctttctcttggaaaaggggcaaagccatatttttatgaacattcctacatgttgacttgtaacggttttttcaatttcatgcacctacattttgttttctggttctttcctcatgcttttgcatacaccaaccagttttttgagggcagtaggaagcagcatggcgtggtggttaagaattcagtctacctgggagctcagttttagcttcagcacttattaacctaccgacctcgaataagttacttaacctctgtccctcagtatcgccacatgtaaaatacttataataatactctatctcattatattattgtaagaaagaggcgaattacttatatagcgtttagaacaatgcctggcacacagtaagcactgtgtaagtgtttgttaaaataaaatgattgctgaatcatccaatgttcctttgcacccattctgattaatattactcagcagttgatgggttttccctaaccaagacatggtttgagaatctgctaaactttgaacaactctgtctcttaatatttgagatcaaccaagagataaataatagttatgacacacatacttaccttggaaggtgcttcataattatttattacttgctgaaaaactcaagcgagcaaagggaggttaacaaggcagtcatggtaacatctaaacctcattaaagtttcatctgcttttaaagcccaggaagacgaatgagttaccagaggaatttcctttcctctgtaaggattatacaggtatttgaacatgaccactaaagtaaattaaatgggatttcttgaatggccaaatagtatggtggtgaggggccaggggaagagaaagaactgagttctcaggggtggatatgaatttcaatgtctgagagaaagttaatatattctagcagttaaacccctatcttagtagagtatcttatttgaaaaaatgtacaatgcaaaataatgtatgaaaaaaggcaaataagatgacaaatcaagttgagaaaaactatccccgaactaaaactatcccccttaaacaatataccaagtattacctggcatggaaggcttggtaaattaccaaaaaatggcacaattttctctcacctctgtatgtatatccctttgcaatatgacttcccccttctttccaccaagatgtggaatctatttttccaacaccttaaatctaagctggctgtgtgaccttccttaatcaataaaacgtagcagaagcgggactgtgggagttgtaggcctaggactcaacacgccgtgtggcctctgctcttactctcttggattgccatgtgaagaagaagcctggtctagcctaccaggaggtcagaggtcacatagagaggaaatgatccgtcctagctgacactctctagaccaaacagctaacactaaccaccagacatgtgactgaggccatgtgagactgtagctacatgagcgatccctgacaagaccagcatgagagccactgagaccaaattgctagtccacaggattatgagcaaataaagtatctttcggtttaagccattaagttttttgatagttggttacatagcgaaagataactgatacagatgattttcagggctcttaaaatgaagtcaaaattagggaaatacagagattcaaaatgaggcaatgtcatggattgaattgtgtccccccagaatatatggcaacggggttaggccatgatccccagtattaagtggttgtcctccattttgtgatttttcatatgcattataaatcataatctctgcctgtggtgaaagaggattagggtgggatgtaacacccttggtcaggccatatccctgattcaatgtaaagggagtttccctggggtgtggcctgtaccaccctttatcttacaagagatgaaagggaagtaagcatggagtggggacctcaaaccaccaaaaaagcagtgctgggagcagagagtgtcttctgcacccagggttgctgcacagagaaactcccagatcgagatagaccattgacaaggactttcctccagagccgacagagaaagccttcccttgaagctgacaccctgaatatgggcttgtagcctactagactgtgagaaaagaaatttctctttggtaaagccatacacctgcggtatttctgttatagcagcactggatgactaagacaggcaaagaaggcaaacacaaacacacaaagcttctcttgtttctaacctatggctgcttggtatacagcattttaaagtttacaattaaattggagaattcttgactccctatgcagacgtgattggtttgggttgatttgtgttacttgagctaacaaataaaaaggtaaaatataaaatacattattcatatttccaaatttgcaaagtattttgggagcacgcttgaagaaaatgaaaaaatagaatggatgcttataagaattgttttaaatgttccatcaaggggaaggcgtctaccgaggaataaacccagacttgccccctttatttggctgagcacagtcctctaggtttgggagcaggaatatttaaagatctgtggaacatgcaccatcaagcttaatatgcgctcctgtcaatgtagggttggaatcaagcccattgtgatttgcctcattttctcttgatttccctagtttttgtcttcctttctacccaatttcctcttcctactattgatcactgttctgccattataatgtctgaactacatttcccagaattccctttcttgtacatttctggttaggataggccacaagaaagactcttgggagatttggagggtggaaataaagcagcagccattttgtagctcacacacattgttcctgatctgttggtttatgtcattgttacgaagcagcccctaggcctgcaattactctatcttcccctggatcctccttcacctttcctgacttctgagccaggtgcatgtgtttagctttgtgacagagagccccagcttctacagaatacccagaatcaaggtcgctggcgaccagggctttgaaccagttcattcccagttgagaatttggatttccaccccaggtatactgaatctgaatctacagtttaacaagatccccaggtgattcttatgtataataaattttgagacccactgctctactagtggttctcagaattggtccctagccagcaacatcactatcacctggaaacttgttagaaatgcaaattctcagcaggggtttgaaccagaacctgtttaaagacctggaggcaacaagaatgtatacaagtttctgtttatccttatgggtttctagcttgtgggacttgtgggtgtcagcttacttacaatatccccttcctgtgtgccccctggacttcaggttccagcattaagtgcagagattgcgtaaccaattcccacaatcctattaaaaatcaagcccctataacaaagctcctactggttctgcttctttaggtgaaccctggtggatacagtccctgttttaaccatgatgatactggcaaagttatctccagcaaattggttggtagatcctccagatctatggggaaagaccaaagggcccccaagaggctacagcaatggcagagaaatttagaagggatggggaatgatgatgatggtggtggtggtgatgagaatgaggatgatgacagagattagcacttctatagcacatactggagccctggtggtgcagttaagagtttggttgctaaccaaaaggtcggcagttcaaatccaccagccgctccttggaaaccctatggggccgttctaccctgtcctatagggtcactgtgagttggaattgactcgatggcaacgggtttgttttttgtttttggataacatactatgtataggttccaatgctaaaaactcatttcccccaacatccttacaagatatgtactattatttcatccccattttacaggtgagaaaactgaggcacagggagattaaataacttgctagtaagtggcaaagacaagacttaagtttagacattctgcctccagaatctgtactcttaggtactgttgcatggctccaaatcaatctatatctaatggtttccatccttgggttaccttgccttttagaaatacttcatgacagaaaggcggggagctagcctgatagtgaaatcaggaaacttcagttctgttccagacttcaccatcaattctctgtgtagtgtagtcatgcccaatgttatcagtgatatcagggatctcaatgttctcaatattcttcagtgttctcttgcaactataaaagttcagaattatacagtgttacggttctaagaacagtgttaaaaggtctttttggaaagctgccatctacaataaaatcaggtaatcaacctgcaactgtgtatttggcttccttttccatctcctcccacattaaaaaaaagaaaaattattctgcagctctccgtatcattataacagtggtttccatcattttcaagtgtgaggaccctggtgattgctgcaaaaaaagttgtgagtagacacgtaagaaaaattacacttttactatatgtgactcaagaaaatacgtgacggaaggccaggctacattaatgcttttaagttgaattttattaacattaagagcatctggatgcacgtgaaaaacagtagtgcacattcactttataggaaaacaacaacaacaactttgtgcagttactgatgcctggacctcatgcggtaccttttccctttgccctggtttcaggggcacacattagacaggaggctttgacaagctgctcactgacattcatcttccttacttacattcaattcattacagaagcacaactattctaaaaaaaaaagctgtactaaaaagaaaaagacacacaatttgctagatgtcttataagccatggttttattctgtttcgacttactgcctgttttattgttgttttgttttgaaatctttagctccttggtaagtgatacaggtctctgacttggagggtcaccccccccccttcctttttgtcctctctttttgcaaaagttttactaagagttaacacaccaaatggcagacatcaagttagagacagggaaccagcagagggtataagcaattcaaataatcggatcatcggtccaagaagactaggggctggctacttccacaggccagtgtccaagtcaacgacttttcgaatttggtcgaacctatcctgagacaagggatataaagagaattggtatcactggcactcaccagaagggtgaaggcgacactgccacggcacttggaaatgtaacagttgctaaacaagtggacatcacaggaggaacagctgcgctagttgtttctcctatgtttgagcctgtgctgcaatggacttacttttctaaaaaaaggagagggacacacgtcctgcatgtattatgatgctcaaaggttacacatcctggaacccattgcttaaggaacacaaaacaaaaagaaggtcatgcaatccaaccttggattgtaaatcactcctagttcctttcttgggtctgggtattgaaatggatgaagaaaggattaaaggtaaacaggcacagttcagtaccaactcaggagaatatcccatggttatcctctcattctatccctcaaccatgagctgaagcactttcacttctgtattttgtcaatacttctgcagttatacatgaccttgtactgtactatacttttgaaagtgctcatctctctcccactagactatgattgactgcagggattgtgtctcatttatcagtcttatcctagtgtctagcatggagcctggcatatgggaagtgctccttgaaggaggatgacactaaattaagcctgttagtttacattagagacccaaatcctagggaagaatccaagtggaaacttttccaagtagtaacaattatcaaacactgtgttttgctgggactgatgataactgcctttaactgtatctaaggaaaggtaatatttattcttttgaaatggcacaaaaggcaatagccaaaaaaaaactttcagtatgaccatgaacccaattaaaattcttcaagaaataactttgagctgatcaaaatgtatgagttgctttctttgtcaccataatttaaagacagaaaaatggtatttaggatttacatatacatgtggagtctaacctcattatgatgattgtaccgagaagccagggagttttgaatcttaaatgtattttcagaaaaaaaaaagtagtttcagagagaaaaaataaaaagagctacaacaatagctctcatttagctggaaacattcactgcacaatccccaaagagcaggataaattgctgagagcatctgcagcctgtctattcatttgacatattagcatgaaagggggccttttgcctagtggagcctggcttcttctctacaggatcttgcttttgagatctttgaaataactatttcagacaccgtacactgagatttactctaatcttaaccatggagttagaaaagtcattataactttgaatacagcttgtttgggtatctagtcaattcagagatcctgcactacattataacaggaggtcggtacacatatagacaagttacctgtggtgatggcacccctggtggtgcagtggttaagaaatcagctgcgaaccaaaaggttggcagtttaaatctactagccactccttggaaaccctatggggcagttctactctgtcctatagagttgctataagttggaatcgactggacagcaataggtttggtttccggcgatggtgagcagaaatatgtgaagttatgcgtaattcaatctggcaacaatcactacatgggtaagatgtttaaaaagtaaaaaaaaagaaaaaaagacctcaaacttaaaaataagcttcgaaaatcaaacttaaaaaaaaaaacaaaactttaatctatcccaagtcatcacagcatgtatattcattcatgttttcttttataatttattctatttgttattgttgttggagaatatacacagtagaacatatactaattcaacaatttctgcacgtactattcagtgacactgattatagccttcagctgtgcaaccattctctctccttttgtgaactgttctttccccattaacaaactcagtgcccccaaagtttcctgtctaatttttcaagttgctgctgtcagtttgatcctatatagacagttcttaaaaaagcacaatgctcaaggcagacattcttcactagttaaattaaaccgttatttgattttgagaagacttcaggggagatatatatatataaatataatttttttttaagttgtgatttaggtgaaagtttacagctgaagttaatttctcatacgaaaatttacatacatattgttttgtgacattagttgcaatccccataatgtaacagcatactcccccttactaccctggattccctgtgtccaattcaaccagttcctgtcccttccagccttctcatcctgcctctggacaggagctgcccatttggtctcctgtatctaattgagctaagaagcacactcctcacatgtattattattattttttgctttatagtcctatttaatcttactctgaagagtgggctttgggaatggtttcagttttgggttaagagagtgtccagggaccacagttttggggttcctccagtctctgtcaaatcattaagtctagtctttttacatgaatttgagttctgttctgcacttctcctgctttgtttgggattctctcttgggtgtcctgtcagggtggttgtcatggattgaatcgtgtcccccaaaatatgtgtcaacttggttagtccatgattcccagtattgtgtggttgtcctccattttgtgattgtaattttatgttaaagaggattagggtgggattaacacccttactaaagtcatatccctgatccagtgtaaagggagtttccctgggtgtggcctgcactacatttattgtacaaaagattaaaggaaagggaagtgagcagatggcggggagcctcaagccaccccaggagcagagcccatcctttggacccagggttcttacacggagaagctcttagttcaggggaagactgacgacaaggaccttcctccagagcaaacagagaaagccttcccctggagctgatgccctgaatttggacttctagcctactagacagtgagaaaataaatttcactttgttaaagccatccacttgtggtatttatgttacagcagcagtagatgactaaaacagcagtcactgattgtagctgggcaccatctagttcttcaggtcttcaggggatatttttggtttaaggtttaaaggttatctcagagcaatagtttcaggggttcatccagcctctacggctccagaaagtctagattccatgagaatttattcactgaacttttattaaccacctacttggtgacaggcagaaccctggtggcacagcagttaagacctagggctgctaacgaaaaggtcagcagttcaaatccaccaggtgtaccctggaaaccctatgtggcagttctactctgtcctatagggtcgctattagtcggaatcgactacacatcaatgggtttttttttttttggtttttggttaggtgacagacaagtctgattgtctctgagattcataaacgaggaatcatatataatttataatgtgatatgctacctcttaaagccctctgtgacccactcgaatataatgaaccctgtgggcatctttacaatacccatctcacttctcatttttatgtgagtgtatggaaattataggatgaattagtactgattactctttcaaggctggctgctctaatttgtcttatctaattagggttagagggcatcggttcagtgttagaattctcactttccttgtaggagatctgggtttgattcccagctaacgcattgcagtggaagattacgcgctgctgtaatgctgaacaggtttctagcggagcttctggactaagaaggactaggaagaaaggccactactacctggtgatctaattcccaaaataagccagtgaaagccctatggatcacaacagtttgatctacaattgatgatggggatggtgcaggactgggcagcattccattccattgtaaatgaggttgccatgaggcaggacagactcaagggcaactaacaactattaagttaagccacccgccttgtcacagtgactggttaatacatcccagggttaaacgaatcagcgtactaatctagccacaaggggctatcacaggaaagagcaaataattcattttaggtccatgatggagtgctggaaggggaggcctcctgaggacttttgcaaaaggtggttctgcattctttaaagactcctgtgagaaacatctttggtaatgtattaagtaggtgtgaagtgcttctacaagcatttttccaactttaaggaaccatcctagaatgatgctaacacatggaaagggcaaagccaatacaattatacagaatcatggagcttgggccctgacaaaattggggcagaagtccaatcaattatagacttcttaagattttatggcagtttgagcttagttttctgctacttgcaacccagtatgtcataactattgtaattatcatagctatattagaaactgtggtatcagagctgatttatgaggaaggaatatgattttccaggtgagtggtagagatgggggcctgagagagttctttctagagataaaaacaaagaactgggaaaacatacgatatgttcagcatcaggtatattacatgggaggagaagtggaaggtgaagctgaaagataggttagtatatggcattgaacaaccctgttagaatgaaaactgaaggcagaatggtgattggattagaagaggtctccattaatctatgcaagagataatgaggcccttgcttattcattgccagtgaagatggagaagagatgaggagtttagcaggtatgacaatgacagaatgacatgatttggtgtcatactacataagaggaaatgagagagttaaaaaactgggctctgcagttttaatcgtgggacatttgggtaaaggagggtctcattaatcaggaacaagaactcaaggagaagagtaagttaaactaacttaaaaatgtttggaaaacatttttattcatttaaagactgtcatgggaacaacctaaatcccaaataagacagttaaggaaacaacctaaatcccaaatacaggggaatgaatggctagataaaagatggtgtatgtattgaatgagtgaaataccatgcagtgaattattgatatttttctgtgggtgactcatctgattgataacaactctactgcaggcacaccctcacggtaaaggtccttcaccctgagcagctgcatcaaggtggtgagatacatgctcatttcaacaccatctctttttctaccactaataggtcccttggcactttatagttgagaaccattgtataggaaaatgtcaagaaagttcctcagactatacagatcactggggaagaattaaatgaaagaagcactgttctaatatgattccagttttgaaaattaagaaaaatatatacacatattaaaaaaaatagcatatctttatgccaatactgtacacctgcatttgtttgccaactgcaccctcccccatgaggcattttcataagttccccatgccaattttttttacatgtttttctaaaaaaattagcatagcacactttgagaataccttgggggggactgcagttggccggcaaatgtagaaggcacgcgttatttgcataaaaatacggtataccccaaaatgctcttagtagttacctctgggtggtaggatctggagtattttttctttcgcttcttctttacttctttatgttttttttccccctaaagtgcacatgtatcaattttataatttccaaaggacatagtctatgttgggtacccacgaagcagaccctgagatgaggatttgtgtgaaagtgatacactaggaaatgttctcaggaggaaccagcaggtgagtaaggaaatagtattgggcagcgaatttggctaaccaaaggtgtgatattaagcaaagtcccaatgggggaaacttaagatgaatttgtcaaggtcaaatgagctgcagaacttattacccctccttctatcggcattggttaagggttgcccctctggagatataaatgcccaggtactttcattctccttgcaggtagagaaacataaggacggtccacacacaagaaacacaggagctggctgttaggaacatgcgtgaaaatgataaacaaagctggaagaataggcatagcacactgactgcacctgctacataccataccatacctatacccatacccattaccataccatactcattgttttggagtcaattcctactcatagtgaccctacagaacagagaactgcctcattgagtttccaaggagttccttctgaattcaaactgccgaccttttggttagcagctgtagctattaaccactatgccaccagggtttccagcatctgctagagatattataagaggatatctttactgtttttttaaaataaatatgaaaacctttatttcatgactatgttcactccaatatctattaactatggataatatttaacataattaaaaaagttgataattctataaattttattattgtagttaaaacatgccatgtgatgggttggtgtttcctgagaagcagaaaaaataccttcttccagataccatctacaaaatgatattcatgcccatatataatctcataggaggtaagagaaagaaataaaggggccctagtggtttgttttcttttagacataggggtgggggacaagagtctgttcttcagtgacaatgacatcagagattcacactggcgactgccttttaagtgatgggtgaagtaaggtatgagttcaccatgacgacattcacacttgattcagctcctgtccccactactgattatttcctaaagcatacatctctgcccaacattttagtaggagctattgaggatccaaaggagccctggtggtgcaatggttaagcactcagctgctaactgaaagactggtggttcgaagccaccaggggctccatgggaggaaagatctagtgatctgctcctgtaaagattactgcctaggaaaccctatggggcagagttcggttctgccccatagggtcgctgtgagtcagaatcaactcaatggcatagaacaacatgttcgcttatgctgaacaatgtgttgttggtttagcacatcatcatcccttcttggaaaggaggatttgaaaactttcatttttgtaaactctactagaagtgccatgtgctccttaactcttgttaccttatattattttatgctctcagagatcacattataaaatgagttgtgttggaaattaggactactgggtataaaaatttcacgacacttggggaaaacaaatgttgactgctgcttgttgttacagagccaagaggactgaagtttggggagaagactctccctccctgacagtaactcgccagaccatgaagaacctttgcagaaatcaatggaggcctgaatcattcagttgacgtacaacaagctagagtagaaagtaaactacatggcttccaccaaagatctggggctggcatctattaataccaacagtaaatacttccaagggagaagaatgggcaaggaaggagaacaatgtcaacttcgagggaattagccaacccagttgacctcaatatgaactccaatgctttgccatatttgctaagatgaaggacaggccttaattcattaaaccccactgtcatgttatatattggtaaagttcctgggtttcttgctctgttttaatatggactggaccagactactccattccccgagctttgaggctcttttcccttttcaagaagtggattatatattataaatttcaaaagttatctctaattccagaaatcccaattctaggtctaagtggatggctgccaaggtgcaaaaatttgaggtatatagggatttttatcctgaggtagatgggacttctggacagacttcaggagttttgagaccccattaaattatttgagaaatattgtgtgcatacacaaggaacgcatttttaggtaagagaatccaggactttcattttgtttccaaagtaatccatgacctatgaaaggttaagttgatcaggagtcagagccagcagatctgtgttctctatgcctgtttgtaactggctatgtcatctcatccagagactttacctcccttagcttaaagttcttaaatttctgaggacccttcctgggtaaagtttcaatgcccaactgtgttttttttgtgcgaaggaaaacggcctcctttcaaagattgctgaggaaaatgtccaaatgcatcttttatacctgcttcttatggctccttcctatagttcagggactagaaataaattgaaatattattactagagaaaggcagagggaagggtcaaaaagaaacgggaaggaagaaggaaaggagggatgaaggttggaaggaggaggagaagggagagagaaatgatcctcactgaagaaggcaaatctatgggataaagtagaatataagcagcggaaggtggtcttgcccttgctctgtgtcaccttctctgtgtacagccgcagcatccacttttttttttttttttaaagtaggtttttcaattaaactagggcaggaggcaggggaattacatacttatgtatagtctctttcaatttttacattttcaattgtcaaatcattgtgccctccaatgaataataaaatacagtaagagaagaatttttacaagctttctcatttgtttaatcatgatgatgtggaaaaatgaccttttaaaaacacttacatgtttaacttttgatcccaagtcttctccccaaagcttaatttattaaaactaaacacatcttgacattataaattaggaaagacgagagggcgctccacgctaattagaagcctcagctaggcagtctacaaaatagataagtacaactattataatgcagtttattgaaaattttattgagtctcattcatgcacaagcaatagaaccgccactcatgagttggtcttgaataaggcaagtcgagattaccacatcttctgcattctctgtagactgggatcagccgagtgacatttctagctgtacttctttccttaatggacaggaagataacaccaagggcagggaaggagggggtaggaaaatctttcttgcgtctggatcctaggttcctgacttttggctcattgtcaagactgataatcaacatgaaagggattctgtttgtacaaatgccttgcaaggggccattactatttactatgtacctataggatttttaggagtcagaactgacgtaacggcaaagggtttatgtaccttatgttctaggtataatcccacaggattacctacttatacggagagaccaaactggggtttagactacagacagtcgcaaagacagggcctctggaactctgagcagctgtgatcaacaaatatggccaccactgccgcattccctgactttcatggggcattcacacttacagaatcacaaaaatagaaaggcatggatctatgacctataaatgcttgtagtcagctaatcgccctcctctaggaacaggaagtgatacagaaaccaaggaacagtgaaaaattatcaagaagctacaagttcaaaaataagataatatagataatacctatcactgacagactattacacagctattaaaatgaaagtgatgaagaaaatgtatcattgtagtaaattcttatgatgaaatattaaactaaaaaataggaagtaaatgtatatatatattatcttgcaaagatctgagtctgtaatcatactgcatgattaaaaataaaaaaaagaagtgtacagaaaaaaaatacaataggaaaacaaaacgaaatcctaacactgtactgtggatgacaggggttaagattatgagtgatttcttctgttactttttcatttattttataattctaagttataacatattcataattatattacttttatagtgataaatatatttatgataaaagacattaatattatttagagacttgtatttaaatctgtaaatattttctcccacatgattcttcaatagctacacaaggttaaaaacaaaaatactgaaaaccaagttgtcaggtctggaaactgaacctggtgagagagagttggccaagtccacaccattggtcaagggcagaaaacatcctcaaagacaaggttgccaatacctaatctagcgcaccttcctacaaaatcaaatagctgtttctggcataaagacaagtgttgttgctaggtgcccttgaggtggttccgactcatagtgaccctatgtacaatagaacgaaccactgcccagtcctgtgccatcttcacaatctgtattatgcttgagcccatggttgcagccactgtgtcaatccatctcattgagagtcttcctctttttcaatgacctctactttaccaagcatgatgtcctttaccagtgactgatccctcctaataacatgtccaaagtttgtgagatgtagtctctccctccttacttccatggaacagtctggttgtacttcgccccagacagatttgtttattcttttggcagtccatggtatatttagtatgctttgccaacaccaggattcaaatgcatcaattcttctttggtcttctttattcatcgtccagcataaagacaagtagttagggaaaaaaccctctgttattgcctctgttatgcaatggcccatgctggccaatgagcttaggccaacgggctccaagcttaaccaatgagaataagccctgagactttaggtggattggcctcccttcccccaaaggaagaacgcacagaagcagcacagagacctagtcctataggtgattttttctaccatttggaaagctcctgtccaagaatgaaatcacccagagagaagtgcaactgagaatgcagcaagatgatttttggcgatattgtcctgaggcctgatacctacgactggacttttcatttacataagtcagcaaattttgttatctcctgtgaagcccatttgagattttttctttttttgttacttgcaaccaaatgacccctgactcgtatttccataattgctctgcaaagtgtacatgaacatacttgctggctaaacaaatcattattgattaatgtcctctatatcaggtcatctaaatcaccatcactgcaatccactgtcatcttccttttttggacaaatatattttagcatcttataagatgccaaatagagcagctaatattaaattaagcaattacagctgcttgatttttcttagataggtgtgttacagtgtcttactccaaggagtcccaaggttgcgaaagcctgacttagggacaacttgttctcgtcctttaacgttatgtatatttccccctgccttcaaatgactgctccaacccctactgacaaccatctcttcatcacaatcaccttcacttgctgcacgtccagcttttaaatcactggaaaggctttgagccttttcttgcactaaaaccaaaacccactgccatcaaatggattccgactcagtgacactatagggcagagcagaatagccccatagggtttccaaggctgtaaatctttacggaatcaaactgccacatctttctcccacagaggggctggtgtgtttgaactgccaaccctttggttagtagtcaagcacttaaccactgcctcaccgaggctcctctcttgctctgaagggtaaatgagaaccatatacacctggtctgacttacctacaaattcgacttaaagttacagttagaaacagatctcatttgtaacctggggattgcctgtaattttgacaaatcaacaaattactttagatacactcatccacacttgacaaactaaatatttatggtgctttacaaataggtttccataaagatatcttaattgataaagaacaaaagggaagtgcttaatgagccatgcttattcaatccaaatttagacttttcaataaacattaaacataagaacctttttatcagtgctaattaaatataatgatgtagagcagcgattctcaaacttcagcatacatcagaaccacctggaggccttgtgaaacatcagttgttggcccctcctcccagtttttgattgagcaggtctgaggtgttcctaggtgatgctgacactgctggtcagctgccacactttaagaatcatagatttatatatgtgtatgatttaaattacacttttgtgtaattgctgacattaacttggcacctctgattaaaaaacgagtacatgttttctaagatgcagacataatttagatctgaaacttctagacataaagataatgatgtactttaaaggtggatgggaaataacagaattcaagtaatctgggcacaagcttgattaaaataattcattatggaagccaatccaccttcatttccaatggatgacatggccagtcaggaattctgctacatcaagcaaaaggcaggcttacatgctgcccttctgcgtttattagaaaagttcaccaggccaaagtaatcatgtgtaccgtgaattcctgggtgccttcctacctctgctgaacagaagagaacacacttgtttctatctgccagtggaatgggtaacttttagaacagcacctaaacagttcagtaaaacctagttaatttgcatcaagttattaaaatgagagcataattcagagaatctggtgatctccagacaagacaccttattattttgtatttaaaacaaaaattcattatactgagaatgaagtatatataacaaaaaatttgccatttcaaccatttttaagtgtatcattcagtgacggtaactacactcaccacgttgtacaaccatcaccagtctccattcccaaaatgttttatcacctcaaacagaaataccctcaataccccttaagcaatagctccccatccccccactcagcacctgggaaccactaataaacttttgtctctatgggtttgcctagactagatatttcatgtaagtgatattacacagtatttgtccttatgtgtttgacttatttcactcagcataatgttttcaaggtttatccatgttgtagcatgtatcagaacttcatttctctttatgggtgaatataatttttcattgtatagatacatcaaattgtgtttattcattcattggctgatagacacttaggttgtttcaccttttggttcttgtaaatagcactgcagtgaacactggtgtacaagtctgagtctctgctttcaagctttttgggcatatgcctgggagtgaaaaagttgggttatataataattccatatttaactttttgaggaactgccagattttttcacagtggctgcgctatattatatttccatcagaaatccaggaggattccaatttctttaaatcccccccaacgcttgttatttccagtttttcttataatagccatcctagcgggtatgaagtgatatctcatcgtggtcttgttttgatttccctaataactaatgatgctgagcatctttgcctgtgtttactgaccatgtatatatgtcttttctgcagaaatgtctactcaagtcctttgtgcaatttttcttttctcgctgtgactattccacgtgagtcttaaggcatggagctgccattcagaattgttaacccatattcctttgaaaaacaaatttactgactagggtacaatatttgtatagagttcttttaacctttaccttgccagcatccagtggaagctttccaaagttactcaggttggttttattccttcactatggttatgctaaccaaacacaaactaaacccagtgctgtcaattcccactcataacgaccctataggacagagtagaactgccctgtagagtttccaaggagcacctggaggattcgaactgccaaccctttggttagcagctgtagcacttaaccactacgccaccagggtttccatggttatgttactcatttgtaatacagttaagttcatttgctactatttgcattccatttttagatgtcctccccaacatacatacatatcctggttgatttaagtatttagttataggttttatatgaaactttaccatagttctaaaatcagaaccacgttaaagaaaaaagcagtgtgctcagagaagtgtccctgccctctcgtccctcctacaccattggtagccagccaatctcattagtctctggtttaccattcctgtatttcttgttttacaaatggtcagatacatatatatttacttatatccttttctttattacaccaaaggtagcctattataggctcttctgcacttttctttttctgctttacaatatttcttggaaataacaccacatcagttccatttactgcattttacccagtgaactgtctcctgccagtctctcctgctgccatttctcttcaactgcttctcactgtcttcagtgttatagctctctgtctcctgcgtcccagagcttctcagtgcaggatcctaggtccaaacgttgtgctctcccatcctagctgttcttccttggtggtggtgggttcctttctcacctgcctctgggatggctcatgtcatgctcagcgggatgacaaaactgaccaattcctttggtgggccataattactctatgtacacagttctgcccaatcacttggatgggagttagaagaccatggtgggaaaggccacacaaaagcaatccactgtaccacactcaagctaatcatttaggggacaaaccctgtccaagacggcattctaactacagaaattacaacttgaatttctgggtcttgcttgttccagcttataagcttttatttggatattttcccctcttcccagtcatccatgaccagaccctgtgactcagatcttttctgcctgattctctaacaagttgacaactttcacgtgcctatcctattgctatccctgactcagaattcttttctaaggaagtgagccgtgttttgatgccagtgttttaatctggctctggtaaaacatatacctatctttacccagcggcatcactagtgaggtacgggggatgctgactgcaccaggtgatgccgtcagagggggttgacaccataatgattgtctataaaatttttgtgcagcagaaatttattacttttttacaaaaatatccctgtagttaattatagagaaacatttttcacatgcccagctaacatgtgtcaatatacctacaagattaaaactctatgctaatttactttttgaacattctaatggcttccagtcagagctgtcattactacccaattacaatgacacctctaatcacgaggtttcctctgcacacactacaagcatgcactattgtttctgttgctgttggcatttttatagtcactgattttgtgaaatttcctggtgttttagctacaatattgtggtaattagtatttgtcaacctgtatcaataacttttttgagaatgaagtagtaattaaaggaaaaggagaaaaattgaaaaaggcttccgctgagttactaacaatgttgtaattaataatgtaattcaacgtagaaagattttacaaaacaatttgtcagtattcatataatctaagaatttaagcaatttataactgtattcattgtatattatattctacagttaaaactgataataaacattactaagtattctttatggtctgggacgggaggaggtccatggcgagggacaccatgagttaactcactaggtgacaccaacctgcatgatgctgctgcgtttacctcttcttcctttacacctccgcccatttttaaattgggttgtcttttttgttgagttgtaggagttctttgtatattctggatattaaacccttatcaaacatatggattccaaatattttctcccattctataggttgtctctttactttcttaataaattccttagatgcacaaaagtttttaattttgatgaagcccaatttacctactttttttcttttgttgctcatgcttttggtatcatgtctaagaatcttgtcaaaaacaaggtcttgaatctctattctcatgttttcttctaagagttgtatgattttagttcttttatttaggtcatagatccattttgagttaatttcatgtatggtatgaggtatgagtccaacttcattcctttgcacgtggagatcctgttgtcccagcaccatttgttgaagagactattctttctccactaatggtattgtgtgtaatttgataatataaatccacctaagtcaaagtaagtcgttcttggactttaaaagaggataaggacttcactgagttttataatgtcaaagtacagtatcctatgcctttctctagatttccccaaaagggttttgtctatggataaaccaacgcattttcctctttcttctcgtttaaggtctaatcaccagtaaaataagaatctttcatgttttaacaaccaagattacattatgacagaaactttattatgtcatatgtaaaacatcctccctaatggggttatctctttgaattagtcaattttgacttatctcgtcagaagaaaaaatatatattttaaagctaaaaatggaccaatgttaactatgaggctgctaaatcacaactggcaatcaggttatttatttcagtacactgagaaggtgtgataacataaacacacagagctggctgaaatcttacagaccatctcctcaaatctcttcttacctaaaggaaggaaacttcagcttaaaaaagggatacttcttgtcagaggagttcatttagttataaaaactatgttactggtcagactgtttctcatttcccccatggaaagagtcactgtctcaacatatctgccgacggcacggagcagggtggatagcacatatgctgggcaagagacaggacgcagaaaggtcttgagagcctggagcagtggattacaatggattatatctaatgagtaaaacgcaactgatgtcaacacgctgccctggactccagtcaagacaactgtgcaaggacagggtaggaaacagacatggtattagcatatgccaaaaataattcagggatttacatgtgagtatgcagcctggtggtgcagtggttaagtgctcagctgctaaccaaaaggttggcggttctaattcacacaggcagctttgctggaggaaggtgtgacagtctgcttctgtaaagattacagccttggtaaacctatggggcagttttactctatcctacagggttgctgtgagtaggaatcagctcgatggcgatgggtttgtgttttttggtatgcagcttcagcctgaatcaagagtgtggcatggctgacaaacaaatgtaatacatacctggtcggcgtgaagagctgtacagtatgcccagagggggtgaaggagaagagactctgctctctgtctcactactcagatgggactttgagttggatttggctggattccattataaggcatatggtgaaacaacattaattacagagcaggatcaggatggtgaaccacgccacacaagcaacagctgaacaaactgtctttgtctagcccagaggaacaaagccttagagggggtatgaagagctgcccctagatgccaccagttgtcagaagaagacagattagaaatgttctttgtgtcctcaggcaacataaccagcactcataggtaaaactcctgggagacagacttcagagaaacagagagaagtaattgtaaaagatgagagctattcatagatgaatgttagctaaataaaatattaacccacccaacccactgccgtcgagtcgattccaactcatagtgaccctacaggacagagtagaattgccccatagagtttccaaggagcggctgttagattggaactgctgatctcttgattagcagctgtagcactttattgagtccttactttgtgccaacttctgtgctagggagttttaaaattgttatctggttttatcttcctatcaatcatatgttaggtatgattattatcctcaatttaaatatgggacaactaaaacctgagtaacttgtctaaggatggttcagctggtagtgctggagcctgtattagagttcagtctgtctggctacaaagccaggtgctcaacccctacacttcattgctatgggctaccttgggaagtcaccagaggtgtttcaacatggctggatggcagagtgtcgaggactcatcaggcagggagttgaaaatgacctcatgttccctttctatggagagagtctaagactcctttgtcctaggagaaacacattttgagcatgtctaactacacttgcataaacaagagttttagatctactctaggtgcattgtgaagtattctgggattcctcctaagacccacccccaccaaggagcaattgccctcccaggacaaagaggacatagactagggtaggggcagtggactcaggggaagaggaacaggatgccactacttgctctgagacatttgcataagtacctgactactacaggtcaagggtcaagaagaatgagggaatgtaggctaagggttgacttcggagtagcaggggtgattgacaggtcagggagcatgctctgcttcccggagataatcaccacaaatccagtggaggaagtcttgtgctctgggtcccacacaggcaaaagggttccgggggaatggaagtctgactggagaaatggtcgcctcatcccagacagcctgcaaaggaaaggctgaactgttgattcccaggagaaagaaaagagctcttggatgacgtgctctctgaacccacacccctgaggaaattcgggccccggcaaagggggtaactgacaaatccccccaccgtcccaataaaaacatggaatgtttcgaggtggggtggggtggggtgatctgttccatctgcctaaggtagtgtagtgaggcgaagaggtgatgagtcacaagcactgtccagagtttctctgactccttcattgagaaggaaaacagagcagcttaaccagtggtgcaagggaactcggcaaccagcagcagcaataaaactgcccagtgagcagaaaggagaacgtctaagtacttgggaatcaatggaagtaatatcctatcagtaggatgtctgacaaggcgtcaggaaagagcatagcacctaaaccaaacccccaaaccaaacctattgccgttgagttgattctgactcatagcgaccctacaagccaacacttaataggcgacttatcctgcagctgaggagacgtactgcttcagccttccctaaagtgaaccgccctaagattttgctattcagtttaggaaggaaggaaggtaagtgcctcttattgcgccacaccctatgtcagacaattaaaaaacgttatttttcatttaatccagtcacatattattggctcctttttatagatggaggaactgaggttctgaagtgttgagtaacttctccaaagctacaacgggaccgggatttgagcccagggctggctgcacagttcaaacactgtagccatttctatcatgctgcctcaggactcggaaaacttcaaaagttctgaagtccagaaccaaaaaggataagctttccttccctctctggctactaggcaaagggcaagtctcactctaggaaaaatggtcaggaaattcactttctgtgacatttgtcccaagagatttgcatttgaacacaggatggttacagtcaggagagcgtgctaaaaatagaggaaaagagtgaaatgggggcattactgatgatgtagattagagctggaacagaaggtctggccaggcaggtgtccctcagtttgcctgaaaatccatttccaactctgcttctgcttaaggagctgatgatgaggttcccaggaagatactctttcagaaacaggctgccccctggcccagccaagctaggtgaccctctaagattcccagcaagatactccttcagaaacaggctgccccctggcccagccaagctaggtgaccttctaaggcagtcagaggcaaggaggcaatggatactgtgtgcacagccgtcttcggggtgaacacccaggtttaattcagtggtaatgagtaatgaagaagatttgctggtctttggaatttataatgaccctgcagcaagagctgtcatcaggataccatctctccttctgagggtgctgactatactctcaatgcctccccacctcctgaaaattatctctaatttctctgtgttgaaaaggagacaagtagatgaaaacaacaaaaaagtgagagggcagctccatttcatgaaggtttcatcatcttcagaagtccatagatgaggccaaagtatcacatcctttatttttgaaaagtgagagttataaaggatttgatcaaaagggacaaagtaaattaaatggcatttcctacaaatatcctaaaaacgtcagtcgcacaggggcatgctaccttgtccaggggatcagagctggcttaactggcttcagttttgtcgtatgtttaatatgaatttaaataaaggtggcaatccttaagctaaagaaaattaaatatgctgcaatgtattacaaaccaaatgggagaactacaagaattataaactttcaagttgtcaacattgggatattttgaaaagctcttatcttgggtgttaaaaagaaaaaaaaaatcttctggattagttaactttgcctaaaaggaattagatggcattgcacagatttaaaaagatgatatgttaatttacgtgctgataatacagtaaatgaaaactagaaatggtgccaaagaggtcagtctatcctaggctttgtcatttcttggttatcagtactaataataaagtgtaattttaaaataaaatgattccttcagcagatagcacacaattcgctgcagctgaagaatagaaaatagattcgttctatgactgttatcttggcttatcatcactttagcagggccctctacttgttttaaaactttgtcatcatgtgtgtggtctactgcgtgggatctagcaaatgctacagttcaactctgtgagctccatccaataggaactcacagtgacattatagctccctgtccttgcccttcgagggtccctatgtggcacaaatgcaattcctaatctaaaggttggtggttcaaacccatggaagaaagctgtggcgatctctttccacaaagataatagccaagaaaactccatggagcagtcctatgctgtaacacaaggggttgccatgagtcagaatcgactcaatggcaatgagtttggtttttggttttggtcctgccctccaggtgtccatagtctttagacaagatgattggacacttgctttctttcagaaattcactcttaaaggaaatgataaacccatagaatcacattttagaggattttgctagaggggaacagcatgcatcatgaaatctgcgttccctcgccaggttcagttgtcaccacctctgcttgccaatgcaccaccttgcaagaatttcttcctttcttcaggaaggactactttatactcattgctagcaaaacttaccacatcctgacctgagatgcatgaaggcttgtgaagcctttgtcccagccagggcctctagctacttagcatccttataggtgcccctgaatgatgacccaagggtacactgagaagggaggagaacagtgggcagtgtccatgggctgacttagattaacagcagaacacatgactgtggtacttaagcatcttcaaaatagatcccacttcatttactggtttctgtccatgtacctgtcttcttcatactccacctgatgcaatgatgtggatgaggctttgaaaagaaaaagtagacccctttatgaatggctgatttggggacctgtttggctatgtgcaggttcgcagtttattgcaacatgatttgtttcagctggttatgtgcagagaaaagctcgtagcaggtacccaaataactgcagggagaagttaaaaaggactactgcctgctgagagaacagaagaattgctttaaggactccctgaagcagagcctccagtgagcaaaggggcactggcagggaggcagagaaaagatggtagctgacagccaactgatgagcagtttgagaaaatacaaattggccatttggaccagaggcttggggatcaagtttgagtcaaggaggtggagttgcaaatggttaaaagctctttggacagccttgaaagaaacgctttgtgagagaaagtgatccactctctagccccttcattcagagtcaaagatgaaagagacctccacagaggaaaatcttggccaactggaacctggccttctagaagccccagcttttacagtggctgcagacccaagtacaaaactttccccttcctctccctcctccacacacctccactttgacaagtgggtagcagcccctgggcacaaataaatctagtgcttaaaacaccaaaaaattaatatgtagtgacaggctatttcattatgaccacctaattcattatgtggaaagaaaggaaaattcaagtggattcgaaaggctgatgccacactgaatttttggtatcccaccccaggagcaacacaagatccaaaaaataagaaaaagaaacttgataagatgaaaagaacacatccctaccccatgacccgaaatgacaaagaagctagagacttgtgagggtcagtgataaacagaacaatctgaaattctggaagcaaaatgtcattcaagtctcagggttcccaagccatctgtgtgactcactataagagggtccattctcagttacctctgtagcctgcgtaggtatgcaggcacaagtgtgttcatgtgtgcataagtgaaggagaatgaataggcgccagggtgaggggacagcctgaagaacagagaactcttttttagctctttgaaaactgtcattttataacatatgtgaatatgggattaaaaaaaaaaaattactttttaacagatcaaacttcagtcttttcaccaacatttacttttaggttttatctttcacaaaaatatattttttttaattcctctgttttgacagtttataaagaaaatgttctacattctactttggtgagcagcatctggggtcttaaaagcttgtaaacggccatctaggatactccactggtctcgccctgtctggagcaagggagaatgaagaaaaccaaagactcaagggaaaaattagtccaaagaactaatggatcacaagtaccacagcctctaccacactgagtccggcacaactagatggtgcctggctaccaccattgactgctctgacagggatcataatagagggtcccagacagagctggagaaaaaagtagaacacaattctaactcaaaaaagaaaaaaaaacaaaaacagacttacaggtctgacagactggagaaaccccaagagtatagcccctggacaccactgtatctcagtaatgaagtcattgttgcggttcacccttcagccaaagattaaaaagggccataaaacaaaatgagactaaaagcacacgtcagcccaggggcaagaatgagagggcaggaggagacaggaaagctggtaatggggaacccaaggttaagaaggggagagtgtggacatgtccaggggttggcaaccaatgttacaaaacaatatgtgtgttaattgtttaatgagaaactagtttgctctgtaaaccttcatctaaagtatgattgaaaagaaaaataaacacgaggacaaataaaaaaatcctgttttagaaatgcaagtttaacatcctcatggaccatcacataaatacctttatgttttccccccaaatacattactagttaattgaccaaatttacatctgactgacatcaagaagtttccatattatataattattataacagaattattattaacatgtaattattcaatcaattataataattaaacgataatgtgcggggtttaggttcttggtaatgatccatggagctatatacacttttgcaatacagtcctcaagatcggttttcagacattgaggtttgggcaaggtggtgtatagagtttatgctcaagaatttatattcgtctcaggaaatatcctcacattgtttttgagggagaaaaaaaatatatatatatattttcttatttgtctccctcttgtaaaattagcctgccaggaagtttttacctatttgtatttctgagaaattgactttatcatatgggcttagaaacacctgtacatcatactctgttgcctggcttctcattttaagctagaattctctgcggagttacttcccccgagtacacgcgcactatgggaagcagtctctgctaaatgaattcatgaccatcttggaattttatgagattaccaaaaccaatttgactttggccctcggcacacaaaacccaagacaacaatgctgatgtcacaaaaagacacgctttttgtgtttctgagaaaacttccatggatgcagttacaaatgagacggaagctgagggacagcctctgcctttggaaaaaaaaagataagagatttttttccaaactgatcattttccatcttctcagttttgaagcagagtcctgtggtggcacagtgaacacacacaacttctaaccgaaatgttggtggtttcagtccacccagaggcacctcagaagaaaggcccagtaatcgacttccaaaaaatcagccactgaaaatcctatggagcgcatggggttaccatgagtgggaatggattgacaaaaactggtttcaaatttttaaagtatttttgcttcactttgtactctgagaaactaccctttgaaaacaaacaataggcatgtatcacaagctatatcttctttgcagccaacattgctttctagaagagcgccatctactatggtagttgagtatctgtagccattggactctgaagaaagagcctgagcctaccctcggcgtactgtaactaatggattccattagaaaagcaggaatgctactgagcatactgaggacctttacatttaaaaacttaaattattcacaactaaaaacaaagacagagtctagatagttctgaacaaggagtaattaccaaagccaatactgctgaggctcttacacccatgacagctatttataatctctcctcccacatccaaaccttaaaatccctggaccattataggacttcagtcacactgctttggttataaagtaaaactgtgtatttcccacccctgagtactgaggccctagggaaggagctgatttgaatgctaatgaattggatctccctcataaggctgtcatcggaaatcagaggaagtggatgtcttacagcatttcatacctttagagaggctgtgatattgacacagcacgtaaaggcaacacctatagaacaaggacatttttctggactctattccagagccgcactcccacccccccataccatgactgtgtaacattcttttccagcaaactattagagtttatagaaagctggagtttggtaactgggactactcctcaatcagaccgctttgtgaattcacagctcgtaatttctacctatgacactcaggtaagctacttagaagctttacatctaggacaactcagacacccgctatacaaaaggaacccaaatttggggctttgttttccaattattctcatgacattctaggcttaatcatactttgtagagacaggattaaaatagctaattggctgaaacaaagcaaactgaagccttttgattaatctagccagccagctttccattcctgacatcaaaatttatattctccgtgaaaaacaaaaaaacaaggctgtggctatgtaacattaaaccaacacacaattaacaacactttgttctaattatctctgggcacaattaatgttggcccgacagttcatttttcttctttgataggtcctagaatatttatggagattagtccttgatgcattggccttctctaagatctggggtttttcttacaagctcctgtacaaacctgagctgggcaaagtaagacatttatgcagaagaattcttcgtgtattgactttttctaacatttggggcttttctagcaagcttccacccaaatctggctgcggcagtgcaatgcggtcagaggtcacctatcaccttggctgactaccccacactgggcatttttttctttcctctcagcagttggtcataactgataaaaggttatgacttgattgaacaggcttccaggagttggaaggccaaaagggctgctgtaaaatagccatgtagatgctaaacaaacccaaggtaacaaaaatcctcggctgcctattattgggaaacttatattgcaaaaagttcagttacctcacatcagtagtgaagggacaggcaaaaagaaaacaagcactaatcaaaggctttgggtgattggtaaaacttcaatttatgggatacatgtatctttctacacttgaaaaggagtttcttctgaaattggcgggacctaagctttaaagcaataaatattctctccatggctcaggactgtttgcaccaccatttggcgtgtttgtttgggcatatcattttaccttctcaaagtgggttaaagtgccatgaggggaaacagcctgaagggactggatattcaaagggctgttaaggctacctctgaacagattagagattagacaactccaagaattttaaatacacacattgttggctgtttatatgtattggatagatgattagctccatgatttgcacataggttgctggctttttcaagtcatccccatgcacaatggaatgaaacacttcccactcctgtgccatccacatgaatggttacagattggaccattgtgacccacagggttttcactggctgattttcagaagcagatcgcgaggcctttcttcctagtccatttcagcctggaagctctgctgaaacctgttcagcatcatagcaacacacaaggctcccctgacagataggtggtgtctgcacccatgagatgcactggcttggaatcaaacccggatgtcacgcatggaagatgaaaattctaccactgaacccccagtgtccacgacttgcacatttaggatgggccatacctttcagtcttatctatggctggaagtaccgtaggccccaggcaggcccatgtcccaatggctctgagaggctgtttcatgccttgctgctttgcccagacagttcatttcctctgccctttctcctactgtttgcctagaaaactggcatgaagtcttgaagactcagtttaaatgctgccttcttatttccttgccttctcctaaaagaatctggttagatacttctatctctgtgccccactgacccttgtgcaatacctttttttatttgtaaaatgttcacgtttgtgatttttatcactttaattaatatacttttgttttcttgactgtagtgtgagtgtctcaagggcaaagagtatgctctgtggatctttgtaagtctaggacccagcgttaaggctgggcctaaacacccaaggaaagagctgaggagagatgtgaaggaaaaagagagagagaaagaagaggaggaggaggaagaagaaaaagaaaatgcaatacctaagtaacaacctacctttatgggtggtattaaaataattctgacatttaaataacttaagcacaagaactttgcctaatcacataattttaaatctcatccatctaaaataaaacaggtcaggcagtataaggacagctgttcttttcaactcaggggtgtccattccctttctcttctggaaacatctctatggttttcctttccgctccctcatgaatagacttgatgagactattggttgagatgcaacaccctctgatgaccgtgacagtgggcacataaccagccaagccaatgagatccctctctagagtctaggaccttttttttaaaaaataagcaattttatttgagaatatacacagcagaacatatatcaattcatcagtttctacatgtacagttcagtgacactgactacattctttgagttgtgcaactattttcaccctccttttctgagttgttctccctcattaacataaacttactgccccctaaggttcctatctaatcatttgagatgttcttgtcaatttgattccacatagattttaaaagagtacaatgctcaagacagacattttttaccagttaagctaaactattaattggttttaagaagacttcgagggatatgctcctggtttaaggctaaatattatctcagggcaacagtttcaggggttcaactagcctccatggctccagaaatgtcaaaatttgaaattctattctacattttcccccatttgatcaggattcttctataaaatctttgatcaaaatgttcagtaatggtagttgcgcaccatccagttcttctggtctcatgcatggcaaaggaggcagttgttcgtggaagcaattagccacacatcccatttcttcctcctatccttgactttcttcctctattgctccaggcaaatagagaccaattgctgtaccctgaatggccatttgtaagcttttaagacctcaggcactacacaacaaagtaggaggtagaacagaagcactgaacacattattaggccaattaactgggctattccatgaaaccatggccctaagcctccaaacattagtctagggcctttgatggagctactcggaaagaggaacaaccttttcactggtgttgctgaggcagtgggatgtaaacctcgaagcttctagtagctaccacagctaccacatggagaaaacctgcctgggaatgaaaccagctcagaggaatacagatctagcgatgggaaaagacagtttcctgatactgtccatgctcttgaacccatacatgctggatccattgtcatacccgagtttttagttatataacaattctttcttttgcttaagtcagtttaagtagggcctttatcacttgcaattgaaagagtgattacaaataaagtaccttgaaagagtttgaaaacgggatttactgcatggtaaagtttttccaggaatttagatctataaaattatttatttactcagtatcttacactgagtaaagtaggggctccttaaagggtggggtgggtacattttcactaactatgttgcctcctcagcattatttctgggattctctattttggagaaccactgatgcttaaacagatataaagaaatctaatgcctacttgcataactcttttaaaagaatgatcacattttaaatattctattaaaatacatgcatataaagatctatgtactaggatgttcatcacagcattctaatagtgaaaaagagacaacaacctaagtagccaacagagggggattaaactgatcgacttctatatagccattaaaatcacatttttgaggaatagtgaataaatgaggaaacagtcttgatatattgaagagcaggataaactgtacacaatcatattctgtgatttcctaatgtgattaaataccaacaggaaaagaaagggttggaaatatgtgcgccaaaaatgttggtagctgctatttttgattggtttaattacaatttatttatttccttatacttcctttattttcccaattttctataatgtgactatttactacttttgatatcagaacatttctagcacaatattatatacttacatagaatagggattttttttttcacttaaagccccttcaccaaaaagaagttttttgtctctaatcttgccttagtgattgttgctgggtgacccacagttggatgcaaattaatcaggagaaagatacatggcagataccttaagatagcgatgtttagagctacctgtcagcaaagtgtcacagaacataaagactagaaagaaacaattgagtttctattcagactactagcaatatgctgctttataactttttaatttctctttttacatcgtcttagggttaaaaaaataataaatgtgaggggaaaaactgataaaaacttagaggttatcagaaaggctatgaaattagtctattcctcctattagcaaggaaccaaagccaaactagccccattcatggcaacgtcaggggagccatcaaaggcttagaggtgagaagccatttcagaaccctttagattacaagctttcctcaggtctaaaagcactctgacattgggcacatgtgacgagggcttctgaatctaagttcaaagattttgggaaagttctacttaggcctggggggaaagataggttagatcaaaaagtggttgagaccaacgaaagcctattgggtttggagctgaccaggacctacgatactcgaatatctttaaatattgctctaaaagctttatcagtggttctcaactctggctctgcatctgaatcacctacagaattttctaaaaatacagatgtttagtctccatcttagacttaaaagagctgaaatttcctcagttgtattctaggcttctgcatttttaaaaggtttcacctctcttgccttcttgcagctttcactcctacgttaattcttctctcccacatcctcaatttctccatttccaggggatcatttctacccgcataccgacaggcctgaatatcacccatctttttaaaagagcttttcctgtaccgtgtctctctctctgtgtctgttccgcttcacaagcaaatttctcaaaagagctgtctatacttgtctccacgtccttaccttcctcctccaatcagaaactgttctcatcaagatcacagatggcctgcctcctaccagagccaagagtgaattctgtgcttcatcttagttattctcttaccagcattcaacaaggttgcccttgcaattctttcttctttaggcttctgtgatacctcactttcctggtttgcctacctcactagttactgcttctttgtctcagatgctgcatcttcttcctctgccagacctctaatggaggggtgcccccgggctctgtcctctgccctctgccctcttctcctccatatttatactgacttccaaaatgaccttattaagttccacaatgtcgaatgtcacctacatgctgatgactctcaaatccatatttctagccctgacctctgccttgcatatccaaccacttaccagaaaccatcacttgaatatttaacaggcagttcaacttaacacagacaaaacaaactaacggttcagaacacttttgattacaagctctcctcaggctcaaaacactctgacgtggccacatgtgggaagagcttctgaatctaagtttaaagacttagggaaagtttctcctttcctcagtcacctctcttccaagtctcgcctctctcagagatttggtacaaccccatagtcagatgctaagacaaaaaaaaaaaaaactaaactagaagtaacccttgattcccactttcccttacactccaacttcaatccatcagtaatcccgataaagactgacttctaaaatatactcttacttgaccatttcttaccagcaaagcgtagtggagttgtacaactggatttccaattctgactctcccatctactaactgcctacacttgggcaagtcactcaacctttctggggctcaatttccttacctgtaaaacagggatgttaacaattatatctacccagcagggcggttatgaagacgaaaatagttaataattgtaaagtaattggcatagtgcttggaatgtagtaagcctattagcagggcttgctaacatcatcatcattattctccatctgtcctagacacccatcctagaccactgtactaacaccttttgtctggactctgaaacaacctaactggtctccctgccggtacccttgtcccattcttaatccacaaaccagcaagaatttgtgacttccctagttagtagttactaatggtttccctttatgataatattcaaagtctttaactatggcttataaggattttcaggattttccatctacctctctgaacttacaatcttccaaatttttaatcttataatttatgtcccatcacacagttcttatttctatagctctaattcaccaagctttctaccatctctgggcttttttttatatttgctgtttcttctttatggaatgctctttgcccagatcctcacacagcagtatcctttttattatttatattgcactcaaatggccccttctcagaggccatcttaaggtaaataccacccacaccccatccttcagcctcctttctggtatatccccaaatttttcctcctcggagcacttatttgtgtgcagccagggttgagaactactattttaaactaccttgtttgaaacacgaattactgattaacaaaatgcttatgcatagcattttaattgtcatactttcatggaaaggtataattgagtagaaaaagctgttatttactttaacacatttaattgccaagttcttctgaccttgaggctatagctaaggcatcagcgtttacctggcagctcagaactgccaggtgatctcagacctgctctccccctggctagaggatgggaatcaaagatactatgagggttgggagtgttcagcaaaggaaaatgtccagcttgatttctagtcaggtgcaaagttggtccatgagtgaggagaaagggctggtgaggtgagcaaatcatgggtttcaaggcatcatgtcatgagcaaacccatggcctgaggcaaaagcccagaagtagagaacaggcgagatgaagccagcagatcccagaggccaagtctgggaagatccttttgatcaatgggtggggtgaaaggcaggagtgatccttttatagaaagggcctgggacatggcagtgctgctgagagtcatgagctcttttctaagtcatataagctgtctttaaaacaaaagacttgaaaactcagttaaaccacagaaaataccacacatgggcactgaaaagtgacagaaaatgtacaagtggcatccagtttgcccgcgtggctcttaaggcacagaggtacaaagcagaagaggtttctccaccaaatgtcagaacactaaacaaaaatttgaatttaggcctgacagggttgttgctgggaagtgagagtcaacagtccactcttctcctccatgaccaactaaaaatggcccaaaccaaggcactgagtaaacaacttttaagaggggaaagaaaatgcatttgtatgtgtgtgtgtgtgtgtgtgatattatcattttaagtgctggttctggagttctttataggaagttaaatgccctttgtagaaaaataccttgaggagctttgggaatgctatggaatgagccagggaagtggagttgagagacctaaagtaccttgcataataaatgaagacaaacttggtatgggagaaaaaaaaaaaaaaaaggtatgggagaggaagaagtaaattggaaggagctggccgagttctacggcaggaagctgggaattaaggagaaaggagctagtgagaagtgccctgtggctgaagaacttagaggaaacagagctatctaaagaccaggttgaagttcttagccttcagaataccctgccatgcccacatatcctttctggggttggattttgtaaaaactgaggttggtgctaagaaaagaagaaagagattaaaaactgagtgcaagaaggaccccagtcccagaaatgactacaacatggagcacttctgcggtggtgagggggagaggggatacaccagcctttactcaggttgtacaataaggtctctggacaacatttacgtaagtttcaaagtcaggggcatcacagctgcatgctgggctgtttttgaatattacagtcatattaatcaaggacataatattagaagtcaactgtgcgtctcattttcacaccttcttggaacctgtttggagagcaagaattaaggaggctgttttctatcactctgaaaatcagtcctctctaatttctgcaaccccaggggccaaaagattggggtacacaaatatggttgcttcaaaaatacgatgatggaaaatactctctgcctttccaaaatctgcggcacaatgtcgaattttgcccaaagtaatttttgaatcattatggttaattgccttgcaattttccaaaacaacattttgttaaagtgcgtaaatccacgtggaggtctgtgaccagctctggttgctgtgtgtcaaagtgaggtctctgttttcccacgagaaattataacctaagcaaggtatactgtacaccgaaaatatacaggaggtttaaaaaatatatatgaaatttggatgaaacagtgaagattcctttttattatctgttcaagtaaaggatagtgagatttggggatgaagattgttgttgttgttgttagctgtcactgagtccatcccccactcatggtgaccccatccacaatggaacaaaacactgcctggctctgagtcaccccatgattggtttaggattgtgtgttgtgatccacagggtttccactggatgattttcagaagtagatcaccaggcctttcttcctagtctgccttagtctggaagcatccttaaaacctgttcagcatcacagcaacacacaagtctccaatgacagacaggggtggctgcccttaaggtgcactggctgggaattaactctggtttcctgcacaggaagtgagaattctaccactgaaccaccactgcctccctggggatcatattgagcaaatattgaggttaatattgagcaagaattttgggaaacaagcagtgacactatgattacaggaatttaatttagaaaataaaatatttttgagttaaaactgtcgggcttaatataagagataccatctattacatccaaccaatgctggatgcaagagttatcttaaatgtaaagatctctgggaaagaaaaaacaaaacaaaacattacttctcttttacatagtgtattaaaaaaattcactgccaaagatattttttaagtacctcttagcttgattaaataagatgttcttcacaaagttttcttagtcactcttagatgaactaagaaaaacttccaaagtaatcataaataaaaactaaaaatttaagtacttggttccagagaagaaagaaataaaatcaactcattcctatcattgactttggaaatccacttaattcaaccaaaagacaaagctacgagtttctcaaaactctccagaagcaacctcagtctccctggaggaggtgtttacaatgactaccttaaaaagacaaaaatatgaggacccttgggaagacaggtgtaattcctggccccgtgaccaaactcagtggtaaagagctatggcagctaaccaaaaagttggcagttcaaatccaccaggcactccttggaagccctctggggcagctctactctgtcctggtgggttgctatgagtcaaaatcaacttgatggcaacaggtttggtttggttttggtgttgcccaaaggtagctgccagaggtttccttagttgacctttcttccgccccatgtttgatggcacttgattacccatctgctttggtgactcctgtgtggagtagctgaattttttcattggcagttcttgtattaaccattgcatccagataaatggggtggggggaggggggggaagcaatttaaagaaaggtggaagccctgtagtagatggatagaagaggtcacatgccagcatgtggtacaaatgttaactaatttaatcctcattatatccatgcaaggtgttgttagctgccttcgagttagtccctgagtcatggtgacctcatgcaagttattaatattcccatcttgcaaatgaggcacagaaagccgaagcaacttgcccaagatcttgaagcttggaagtagaataactagaattcggaccacgtcccggcagtctggctccaaaatccatgatcttaaccattttgctttgctactgtggataaaattagagtagaagaaggacacactcactacaaacactgtggtggatgggagcaggactgcaaaacctaggtggaaaccaaatgtagctttcccattagaaaagggagtgagtggtcttctttctttccatcactgacattttcaggattccgtagactctatggtcgacctatgttttagttgagtaaaggctcctcgttcctggtttgtaaagaagagctgggctaagtgtagcccctgctcaaaagtaattatgccccaagtctatataatagaatttatggaaaggatgtgaaccaactcatagaaaaagacattttcactgagtcagtgggtgaaatcccgatcaaaaactaataactggaacagtctttgattactgccataaacatttagtaactaatccctgaagtgatgtcaaatgttacaaagtaatagatcagtagttttcaaactgttttggaggactgtggtgttccaaagaagttcctgggtggtacacactggtaacccgcctagctgccaaccaaaaagttagaggttcaaatctacacggaattgccccgaagaaaggcctggtatctatttctgaaaaaatgagccactgaaaaccctctggagcacagttctactctaacacacatgtgatcaccttgagtaagaactgatcaatggcaactagtcagggtcccaaaacttcctcagacaaccctgcagcctagcttcatctttcttttacatatgtacatgttaagcttttatgcaaatttttttcttaaagaaatggttgtatttaaaattttttaaaaattctagtcatccttatatacaactaattatttcattcattcattcattcattcattccttatactcccaccagtacccagtgccgtcgagtcgattctgactcatagtgaccctataggacagagtagaactgccccacagagtttccaaggagtgcctggcggattcaaactgccaaccctttggttagcagccatagcacttaaccactacgccaccagggtttccttccttatactaggtatactgaaaacaaagtgaaatacacagccctttccctcagggagcttacaattttaggaactaatccagtttgagggccaaactgaatttaaagtgaactattgacctacgtttcctttttaaggcaatataatcacagtcactagatggagaccctttcaagtgctacaaattttaactttttcctcatgatggatgaatggctcatgatgggagatgttagatcgtattagtcagggtgaaatgagaaaggaagatttatactcacttcaagccagcgccaataaaagaagcagaacactgttattcttctttaaatgtgttaccatcgctttatttcttacctcgagagctttcaatcgttctaacagcaatttggtcttttcttttccctcctctgtactgctgctttcgctcctcaaatcctcatctaccaccatgtgaagatcttctagagcgtctttgtgttttctctcttcctctgacagtttctcctgaagcaagaaagaattattgctttcaatgatctccactgaaaaataagcaccgttcttaggctgaaagtttggaatgcccccattgcttctgccttctttccagggctgagataaagactttgctaaacaaattctgagtggtgcctatattagtcaacagtagatatctgtactgaaccctggcaggacaaagcctgctctgaatgcagatgtctgccgcctagtgaaagaagggagtgtgccaggcaagtcttaggtggagtcatgcggttaatccgcttttatcctcacaatggaatctggccctaaactggaaaaaaaaaatcaatgttgataccttgatttctgaatggctcagctcctgaaaataagatcattaaagtctctggtcatgcaatcatttaattaattttagggaaagtaaaatattacaaaatattgaaatagtgatttcaaaactctacactgaaaccaattagttgcttcagctcagtaatggcacagttcttcaagacccttagtgccttttccaacactgcgggattttcagtgtagccttggggtggacattaaatgtcattatcttgtcttgctccctgctggaagctcctcactcagccttgtctctggcagctttagagaaggtgtgaagcgctaatttgagcctcatgattggctctcgtgttctagggaaaaagaaacgtcaaggaaatataaaaacaaaaaatctcattcactttgtactatatcaagaccctctagccacaaagcaatgtgtcacggtctcattacactatttaattctaaccactgcacaaccatttgggctaaattgggttattaatggtgagagacttctgtatatttagtcctaagcaaagatcctttgcaaaaacagaagcagaaaggatatgattcttaccctcaagacatttatatatataatctccttagaaaagaatagcacaagagaaaacaaaaaacaaaaaaacaggttttctaactacacccgcttatctgacacggtcaggttccaaaggccaggtcattatgtgaggtggccattatgtgaaaatggaggatgacaatattagatcataaaatgcaggacaggactacatcattacatacctaccagattatagcattaggtaactgccacgctactgagaatcatggctcagccaacctgacacataaccttaaccattgcagaacctcagtgttcgttactgactcaggtacattgttaaaatgaaaaatagctggatagtaggttttctcctttgttgtaaatgcgaaatgtcagataacgaggtagtggataagtaaggaaaaggtgtatatgccaagaggcttcagaggttccaaagaaattgatttaaattcccttttgaaaataaattatgaagtatattaaaaatatatatgtcttactgtatatgactttaaagcacctgaaaccaccaacctagtaacttgacccatcttaatctgttttgtacagacttcagaatataacttctcctgttacacctgtgcaggtgtgtttactaccatagcaggtattcattcagctcaaataaatgccaggcagatttaaagtgcacatgctcttgccaggacacacatccaggctggtagtgctttatagctttgattctttatttaaggcttggctgcttttcatttctatgataggagtatgaactttttagatattgttgttaacccaacgttgcaagaaagaggtctttccaattctcattcaagtttgggatcactgtaaataaacaatatatactaggattataacacaaactgctttttaaaatttcaacatatacctctctgtgtgaattattgtttactgctctctctaccacttgaactttttcaaaatatattgaggtaccatgtaagaattagggttctgcagctaattaaaaacaaaaacaaagaaaacttactgtgtggtgaatggaaggccaaaagactttggaatctgaccgtccttttccagatctaccatttatcagctaggcaaattaatttgggaaaaccattcaacttcaatgagtcctggtttctttgtctcaaatgcttaaatgaggctagtggcaacaaacacacacacacattcatacacatatatgtacagatacatatacatacacacaaacacatatacacacatacagacacacatgtatgtatctgaagtatctagacagtgtctaaacattattctgtgaaacaactgggaacaattctaggtgtgtagattactatatatgagtattgggattatatactctcaattgggataatatactggcatgattcaaaatgagaagaaacagctgcaaacattcattagtaatcagaacatacagtatatgaagtatgaatccaggaaaaccggaaactgtcaaaaatgaaatggaatgcataaacatcaatatcctaggcattagtgaactgcaaaggactggtattggccattctgaaccagacaattgtatggtctactatgcgggaatgacaaattgaacaggaatgccgttgcattcatcatcaaaaagaacatttcaagctcaatccttaagtacaatactgtcagtgatagggtaagactcatacacctacaaggaagaccagttaatatgactattactcaaatttatgcaccaaccactaagggcaaagctgaaaaattgaggatttttaccaacttctgcagtctgaaattgatcaaacatgcaatcaggatgcactgataattactggtgattggaatgcgaaagttggaaacaaagaagaaggaacagtagttggaaatatggccttggtgacagaaatgatgccagagattgcatgatagaattttgccaagatcaacaacttcttcattgcaaataccctttttcaataacataaatggtgactatataagtggaactcactggatgacatgcacaggaatcaacttgactacatctgtggagagagacaatggaaaagctcaatatcattaggcagaaaaaggccaggtgccaactgtggaacagaccatcagttgctcatatgcaaattcaagtggaagctgaagaaaattagaacaactccaccagagccaaagtatgaccttgagtgcatcccacctgaatttagagatcatctcaagaacagatttgttgcactgaacactaataactgaagaccagatgagttgtgtaatgacatcaaggacatcatacatgaagaaagcaagaggtcattaaaaagacaggagagaaagaaaagactaaatggatgccagaagagactctgaaatttgcttttgaatattgagtagctaaagcaaaaggattccaagattccaaggggcagcttgagaagacaaagtattataatgacgtgtgcaaagacctggagaccaaaagggaagaacatgctcagcatttcttaaactgaaagaactgaagaaaacattcaagcctcgatttgcaatactgaaagattctatgggcaaaatactgcacaatgcaggaagcatcaaaagaagatgagagaaataacaaagtcactgtactaaaaagaatcggtttatgttcagtcgtttcaggaaacagcatatgatcaggaaccaatggtactgaaggaagaagtctaagctgcactgaagacactgtcaaagaacaaggctccaggaattgacagaataccaattgagatgtttcaacaaacggatgcagtgctggaagggctcgctcatctatgctgagaaatttgaaagacagctacctggccaaccaactgtaatagatccatatttatgcctactccaaagaaaggtggtccaattgaacacggacatttttgaacaaaatcattaaaattacatgcaaagaaaattttgctgaagatcattaaaaaccaattgcagcagtacatcaacacggatctgccataaattcaagccagattcagaagaggacatggaaccagggttatcacagctgatataagatggatcttggctgaaagcagaaaataccagaaagatgtttacctgtgttttactgactatgcaaaggcattcgactatgtggatcataacaaattatggataatacagggaagaataggaattccagaatacttaattgtgctcatgaggaacctgtacatagcccaagagatagtcgtttaaacagagtaaggggatactgtgtggtttaaagtcaggaaacgtgtgcatctgggttgtatccattcatcatacttatttaatctgtatgctgagctgtctgagaagctggactatatgaagaagaacatggcattaggattggaggaagattcattaacaactggcaatatgcagatgacacaaccttgcttgttgaaagtgaagaggacttgaagttcttactgatgaagatcaaagacttcagccttcagtatgaattacacctcaaaaaacaaaaatcctcaaaactggaccaataagcaacatcatgataaatggagcaaaggttgaaattgtcaaggatttcattttacttggatctacaatcaacacccatggaagcagcagtgaagaaatcaaatgatgcattgcattgggcaaatctgctgcaaaagatctctttccagtgttaaaaagcagagatgtcactttgaagactaaggtgtgcctgacccaagccatggtgttttcagtcacctcatgtgtttgccaaagctggacaataaatacagaaaaccaaaaaagaattgacacctttgtatatggtgttagcaaagagtactgaatatattatggacttccaaaagaacgaacaaatccgtcttggagaaagtacaaccagaacattctttagaagcaaagatggtaagcttttgtctcacatactttgaacatcttattaggatggtccagtccctggagaaggacattatgcttggtagagtagatggtcagcaaaaaagaggtaggctctcaatgagatgaactgactcagtggctgcaacaaggggctcaagcatgacaatgatcatggggatgacacaggaccaggcagtgttttgttctgttgtatatagggtcactatgagtcagaaccaacttgatggcacctaacaacaacaacaaacacagtgtctaaatattattatgtgaaacaactgggaacaattctagacgatacagattatatatgagtattgggattatataaaacacaagagtcattttatataatttgaagaagtggtgatcaatgagggctgcaccagtgagatatgatttcatggaaatggcacctgacttatgctttgatggactgatacaatttgagtggttagaaaggcaaggggggaaggttgggtcaaagagaaaaactgaatcaaaggcccctggcaggaattagttttatctttactggtttatgatgaaaccggattaaatatagtggagaaaaaacttttgagagagaggtgaataacaggattggaaaaaaggaaaaaattcttgtaaatgagaaagagaaattcatacatgattaattcattcatttgttcacgtaacaaatgttgattgaacatggactatggtccattcactcttctaggtgctggaaatataggtataaagtaaacaaagttcccatattcaatcaactaatattctaatagtgggaaacatgccaggtttcacatcaaatcagtaagtaataaattgtacccagtggtaaatactacaaagaaaataaaacagcacaatatgatggataatggggtgtttaggaacatcgttagatgtggtggtattggtaaacctgtctgaagagaacatcccatgagaaagaagtggctgtgcaaaggtctgggagagccagtgcctgatagcggggctaagctggccatgccggtagggctgagtgcaagtccacgtgatgaggcatagtatctatcaatagaggaatagaaaaaaatgagaccagaaagatagagttagacaatggagggtcttgcaagccatggaaaagggtttggattttattctaagtgtggtaagaggaatcagagaataaacagagaactgatagtttctgatttacatttcagaaacatcattctaattgctgcgaaggaggatgggctatggagcaaagaagctgaggaccagctaggaagccattacaaaggaaggaataaaaattaggaatactttgaaggttttgaatcaaggcttacccaaaacagttgtcatactgaatagtaggtcagaacacctggatccaaagcccagcttttatgtttctgcacctagctggacaagtcattcaacatctctaggcctcagtttcccccagatataaaactgaagcaggcagtcatgagaaattcattaatcatcccataatatttgttcttcagaaagtctactcttgctatagcacttcaccatgattggtcgaatccccagttttttctcttttcctggcaaaaggctgaggcacagacatactgactccaaattcgcccactatgtgaccttcctggggtgggagcagcgagcagtcaccattttaggatggtacacaaagaaccattcccccaaaattaggcgtacaacacttgtagactgtgcacgcatcttcctatctcaaaactgaagatcctcccgttggtgcccatgcatatgtatgtcactccctataaaaggaacaaatgtgccctggtttagggagctggcagccttaggtcatgagaccctgcctgtctcccagtttgcgaactgcgaataaacctttctcttcttccaaccctgcgtctggctgacttcaattccatagtctgcttgacaagaacgtattggttgacagcttcaaaatgaaggggttgtactaacatcctttccaatgctaaagatctaggtcacatctttcaggaaggaaatgtggtcaatatgctcgatgccaacagggctggcatgacagcagaaaaaagaccactatattttgtaaacagaaagtggaaactggagtgctgtttactaaagtgtagcaatgttactcaaatgtcagcggttaagcagaaagtgaaaggagagaaaatagaagtaattttcttagacgctcatttgaaagtttgacagggaaaggagggaatagaaaaacgtgtattttaaggagaagagcacggcagaggcaagtggaaacccttttccaagatgagttgtgtcaagatctaaagaagagagtgaaggctggagtggcagcaacaaaggtcagaatatatgaagagctgagccccaaagctgagaagacagaggacgaaggttttaaaatcggcttccctgcaaaatatcactttgcaagagactcagcttctcagttagcatttctaaaccattacacagtgtcttgtttgggttcttaaagaataagaatttgagggcaagtagtttatgtggcaagtgcaggaaacaccacgtgtccaagtgattcagagaagggatgggagccactaaagcacatattactaagcaattgatcaatcccagtgggattaagatcagggaagtgttgcaaaacacatgtctcagaattattgcacccaggggtgagggagctgcagtatttatgcaccactcacaggaatcattggctcctgaggtgttaatttcctggaacttctagcctgcttcccacagttgaggcataaaaatgccctcagacacagatactggtagttgaaagtcacaggagcacgctgaatggttctgggctatgggtggggccaggtgacatctgttatcgagagcaagctgtgaggtcctctgatgttacactactcaggacagacagccacatctgtatgctgctcacagactcatcgttgacttaaaagcaaactttgtgttctacattctaaaatgcttggaaccaaactcagaaggtggggttatctgcccttttcttgtttcctcaatcactttccagtgagaacgttagagtggactgtgataatgacaaagaggggagatggtaaggacatgtttgaagtgagtagaagagcaaatgaaaaaaatcagtgaggggaaaggggtggaggagaaaaagtcccgggagagctgagaatgtggcagtacttcacagacaggtcacaaccgctgatttcagaaaggatagctgttgaacttgtattacactcataaaagcataacaattttttctaaaaaatcaagtatacacactctatccaaacataagcaatccatttcaatcaggaacaaaatcagaaattttagttcctttgttaatcacctgtgatgtccatagtaaaaagagaaagaggtcagaaacacgtggttcttaataaaatctattctccttatgaatctccaagagagaaacaagaaaaataagctgggtccacctctgaggatgccatgttgtgaagagtctgagttgattccagaggtgacctgttttcatttttatggactttaatcagcagtagattctatacaagtaaggtcactgtacaaacaacttccacccttcacatatttcatatatggttgagaccataagcttgtttgcctcaacaaattctagccagtacccaggaagctaaagatttaggagctcagttagtatccaagagtttaaatcaaatttcaccttgtcggtacataaagcaatcttcagagctttatgtttctctaagtggtaaccagggtaatgactcacctttgggggacccttaatcttttattctcaaatagtcagcatcatcaggcctatgtaaaataatatcaatcaacacaaagcgctggacggtatcgtttcaactccaacaaatgacagtctagggagctgggttagcccagagaacaggccacatagctcttcgccaatggccagctactgctctgactataggctggcaggctttcaaaaagatatttttggaggaagatgatcatgatacccttccaccaaacgtgtaaacatgtcttattcatcttcaggccaccagcttcccctagcccagcacacagtgggattcaatgactgtttccctgaatgtgtcatgagttatataacactctatcattcaatagcatttagttagctgggtagtgcaaattatttgtgcttgactactaacctaaatattggtggtttgaacctactcagcaatgccacagagaaaaagcctgccaatctgcttctgtaaagattgtagccaagaaaattctgacacatgggttgtcaggagtaggaactgactggacggcaacaggtcaccttacctatatttaattaatccattcatctgacaaatgcttctgagcagctcctctgtggcaggcatgtggaagatgccaggatacaaagctgaataaaagcacttatggcccctgttctcgtggagcttacagtcttgtaggagaaagtcattagtcaaaatgtcaccagcaaatgtaagagcactgtgatagatgttgtgaggtggagtttcaaggtgctttgagaactgagaacagagggatgggaaagagaggtcaagtcaggcttccctgattgaactcagatcagaaggtacagcggaagtggaccaggaaatggccatgtggttggaggaggggccagcaacaaagaaagctgaagaagggccacctagctgaggaaggagacgaggctggggggcagatggggccaggccatatgtcaaggagtttggcctttaccctaaagaaaaccagaagctgctgaccaggaagccattggctgttttccagtgtgtgtgtccagggggtatgatcaactgctctgtgctctgaaatagctctccagtacactgtgggggatgggttaaatggagattagtgtggatgtgaggagagcagggctactgcaagctgctgattcaaatatgtttaaaatgaccagcccacaaaatgaggtctcacagtttgtaaattttctggtgaattcggttctttagcatgtagtttccccaacaatgacaaataactaacatttccttaggttaaataacatttctcagagtgtgggccaatagccacccacatcagagtccagggtgtgtgtatgtgtgtgtatgtgggggagagtgttgcttgttcaaaatgcagattaatgggcccactcaagccctagtgaatcacaatatctgggaatggggccaggaatctttaattttaacaaaggccccaggtaactgtaatgcacaccaaagtttaagagcctctagacaaaaaacgcttctgagtagaacgtaaatcactttcattttagatgagcttttaaaactgcacattttatttaattttattattaataagtaaaatgttcatttaattaatcatctaaactatcacctgctggagagtgaaagcctaaactaaaccaaactcactgtcagagagtagattccaacccatagcagcctataggacagagtagaacagccctattgggtttccaaggaatgtctggtggattcgaactgccgaccttttggatagcagccaagctcataaccactgtgccaccagggctccagggagtgaaaggggagcctacgaaaagtatgctagaacagtaggtgtaaactgagcaaagtggaagaaattcatcctaagagtaaggacagtggccatagcttgcaacagcctacttatgtagttgatatcagatgttgacctacgcagtagaaactggtttatgctagtgtcagagagacttgggaaatttctgtttgatttctgagactccacaccccaccatgctatggttgttgttccttttcagggaagtagaaaacattaactatctgtaactattatcaatggcttctagaacaacagatactaaagttccaagaaatgagtctacattggcaacaagggagaaaaacatgtctacaactcccctgcttagaaaggcttcttacttataaataatgcttgcatgctctttctttttataaaagagtaagaagaaatctgcccatcagtgtcccaaatggaataggaaagttccaaatgtttgttacaatgggcccagaatttgtaccctaaaaaagaattaataaggaaaatctgaacacggccctcacacctgccccacacactggctgtggctgcctggttgtgtgtacaaagttctccagcccatcactgggagcttggcattatctctgagcccaggactggagaataattgagaatcccacgttaggggagagggaagaggggataggctgtgcgtgtcacatttgaacaaacctgagcatttcatttgacttgataaacagagagtaaaccccattggccactttttatttctggaaacctgccattttccatctcactgagatctaaaattctgttcttatccagggtggggacgcaactccatttttagcctgccttagaagaagtagaaataaaaaaaaaaactacatttccgtcctagctctgcaactaacgactgtgtgatttcagtcaagtcacataacttctctgtccctaaatttcatctgtaaaataaaatgcacagatacagattagcccaaaggtcccttctagcttcaaatttctatgattttgatcttctgtaaaatctcaactttagaggccaagtacttgaaccactttgaagttcagggattttaatacagaataccattatgggtaaatctgcctagaagatacttgtgctgtctggaaaaaaaaaaaacaaaaaacaaaaacctttgtgcttcttttccaggagcatattttctcccttgaagaaaattccctctattttgctacatatttgtcttgggcctttgatagaagtcacagagtccaacctttgcactgaggagattccactcctggccttaacaaacggcctggtgagtgacattaagtgagagttagtgaaaaatactcctaatactcacaggaaatctggcccgacatgagggctccctgagggcatttgcttccaggaggaataattccaagtcttttctgattgcgaggctttagaaagataaagaagattcactcctctgtctgtttttattgttattatttttacctctgatggcagacctaaagcctacatgtagaaatgttgcacgcatgctgatggtaacaacagctaatctctgctccagctcactccttattttttctcatggggactacccttatctcttagcactgtgcaaaaacaaaaaaacaaaaaattaaaaaataaaaataaaaaaaacctcatgtacttacagtttttttttttttttaaactggaagaaggcaaaatgaaaccagggggatatgaagagacatccaactttgggcagctggttagttgcagaagttagaacaaaatatcttctatttgaatatccgatcatgtgttacatccattctgaaacataccaaacccactaccatcatgttgattacaactcacagtgaccctataggacagagtagaactgccccacagggtttctaaggctggaaatctttacaggagcagaatgcctgtctttctcctgcagagcaggctggtgggttcaaacctctgaactttcagttagagcacttaaccactgcgccaccagggctccttgtaaaaacaaaaaagttataacttaggactgaccacataaggcatcgatcagagtggtgactgcatgaaatgtttaaggtctttccagaacacaaaagacatgcaaaatagtgtctaacatttgtataacactttagagttacactgaggacctcatagactctattttctatagtactcatatcagcagggacataaggcaaccatgctggaccccctgacaaaaaaaaaaagatgaggaaacaggcttggggtaagtcattaaatgacctgcttagctgtaagtggcagagccagaatttaaatacagttcttctgatttcaaatgccaggctctttccaaagactcagttacctctttctgactctcccatgcatgtatagatctatccttaatggcaattccatttgagaatctgtgatctttacccaaccgtgaactacgctaccgacagcatctttcctaaagctcccggccattcctctatggagttggtgatcttatcagggatgtcaggtctggtctcagatgactatcagcagaagaggtttaacaaaccaccaccacttccatagttaatgatgattcaattagtccaaaaactaaacacataccgtaagacatgctgaatggaaatgtggaggccagcgtctggctgacagccgccccagtgagccccgttgcttgagcttttctgtgatttatttactcatttgttttctggtggcagggagggtgcatgaaatatattgtcactttagatagcagttcggctaataccgtcacaccattcccaggaattgctagcagcttttattcagcactagcatactaaattttaaatgtcagataaatcacaggattttaaaagaacaccccaatttgttcagagtttaacgttactactattgggcaaacatataaaactcttctttttcatccctggatttgacttacaaagtgaactaagcacgttgtaaaatccccaagattacatgtgtatgatggataagagaacaaagtgttttctttatgtctctaatatgaaccagggaccatcggcatatcaacctacatcctctccccatttattctccactcaacacactcctcaagatgtgggccgtcttccatactgaacagctctatggagctacattaataaattttcagctgatgcttttattacctgttccacctatcagcaacattcatttccttaaaaaaaaaaaaaaagaaaagttcaattctaaaagcactttttatacgaagagaaactctaccgtgaaaaagtgagccctaattttcataaaggcatgctccaggaggccggacacctaaagacattagcaacaaaaattatgtccttttaaccccggatggttgtctgagtgcaacttgcaccaaaagaaatcaaaagtggcaaggatttcatgtagacgggggagctgcagtgcttagtgattacacttaaactctgataaaaacccattgccgtcgagtcaattctgactcatagtgaccctacaggacagagtaggacagctccatagggtttccaaggagtggctggtgggttcaaactgccaaactcttggttagcgcccaacgcttaaccaccgtggcaccagggctcctaaaactattatagaggtctgtaaaaaatatctcataacttaacataaaaatctgcaaaacatattcatccattctctcactctctcattcattcatttattcatttgttctctcttttcttctctctattcctctgtctgaaaggattcacaggacaggaacccagtgagtttccagaaagaaactaaggctgtgtagtgaaatgaacggatacctcagtaatcaggtatttaatggtaggtgggtagctattgggtagctatattactgctatcttttttttgtatatatttaaagcagtcatatatctaagattcctgaacaaagacttaatttaaaataaatgtaaacaactcagaattttctctctcactgtccccataaatacctactgtcagaagactgatgtgtccaaacattgttgttgttattgttagacggcacccagtcagttctaactcatagcaaccctacatacaaaagaaggaaacactgcccagtcctgagccaccctcaaaattgttgttatgcttgagcccgttgttgcagccactgtgtcaatccatcttgttgagggtcgtcttcttttttgttgactttctactctaccaaacatgatgtctttctctggggactgatccctccccataacacatccaaaatatgtgagacgaagtcttaccatccttgtttctaatgaacattctggctgtactttttccaagacagatttgtttgttcttctggcagtccatggtatattcaatattcttcaccaacaccataattcaaaagcagtgattcttcctcagtcatccttgttcattgtccagctttcacacccatatgaggttactgaaaacactatggcttgggtcaggtgcagctcaaatgatatctttgctttttaacacttgaaagaggttttttgcagcagatttgcccaatgcaacgcgtcctttcatttcttgactgctacttccataggcattgattgtggttccaagtaaaatgaaatccttgacaacttcaacctttactctgtttatcataatattacttactggtctagttgtacagatttttgttttctttatgttgaggtgtaatctgtactaaaggctgtggtctttgatcttcatcagtaagtgcttcaagtcaccttaatccacattcagcaagcaaggttgtgtcatcagcataccacaggttgttaatgagtcgtcctctaatcctaatgccccactcttcttcatagagtccagcttctcaaattatttgctcagcatacagaccgaataagacggtgaaaggacacaacgctgacgtacacctttcctaaatttaaaccacgcaatatccccttgttctaaggtctgcctcttgatttatgtacagattcctcatgagcacaattaagtattctggaattcccattctttgcaatgttatccataatttgttatgatccacacagtcaaatgactttgcatagtcaataaaacacaggtaaacatctttctggtattctctgcttcagccatgatccatctgacatcagcaataatacccctggttccatgtcctcttctgaatctggcttgaatttctggcagtttcttgtcggtgtactactgctacaattgcttttgaatggccttcaaaattttacttgcatgtgatattaataatattgtttgataattccatattctgctggatcatcgttctttggaatgggaacaaatatggatctcttccagtccgttttggacaggaagctgtcttccaaatgtcttggcattcatgaatgaccactttcagcactgcattcgtttgttgaaatatctcaactgatattctgtcaattcctggagccttgtttttcaccaatgccttcagtgcagcttggacctcttccttcagtactattggttcctgatcatatgttacctcttgaaatggttgaacactaatcaattctttttggtacagtgactctgtgtattcttaaagtcttcttttgatgcttcctgcctgcgtccttttgtattttcccaatagaatctttcactattgcaactagaagcttgactgttttcttcagttctttcagtttaagaaatgaaaaccatgtacttcccttttggttttctatctctagatctttgcatatgtcattataataccttgtcttcttaagccacccttcgaagtcttctgttacctctttacttcatcatttcttccttctgctttagctactttacattcaatagcaacttttagagtctcttctgacatcattttgggctttactttctttcctgttttctctaatgacctcttgttttcttcatgtatgatgtcctcgaagtcattccataactcatccggtctttggtcattagtgtttaatgcttgatatctgttcttgtgatggtctctaaattcaagtgggatatactcagggtatatttggctcccatggacttgttctaattttttcaactcgacttaaacttgcttatgagcaactcatggtttgttccacagttggcccctggcctttttctaactaatgatattgagcatttctattgttttttttccacagatgtagttgatttgattcctgtgtgttctatctggtgaagttcatgtgtatattcgccattttttgttgttgaaaaaaggtatttgcaatgaagaagttgttggtcttgtaaaattctatcatgctatccccagtgtcatttctatcaccaaggccgtattttctgactaccagtccttgtttccaagctttgcattccaattgtcagtaattatcaatgcatctgtcaatttgtcatacttgtggggacgtcagtgttgctgtgatactggaagctatgccaccagtattcaaatcccagtagggtcacccatagtggagaggtttcagctgaggttacaagactgaaacagactaggaagaagggcctggcagtctatttctgaaaaaaaattagcccatgaaagccttatgaatataaacggaacattttctgatatagtgttggaagatgagcccctcaagttggaagatgctcaaaatataaccgggaaagagctgcctcctcaaagtacagtcaaccttaatgacatggaggaagtcaacattttgggaatttcatttgctgattggcatgactcaaaatgagaagaagcagctgcaaacatccattaataatcagaatgtggaatgtacaaagtgtaaatataggaaaactggaaattgtcaaaaatgaaatggaatgcataaacattgaatcctaggcattagtgagctgaaaggcactggtattggccattgtgaatcagacaatcatatggtctactatgccggcattgacaaattgaagaaggatggtgtcaagttcattgtccaaaagaacatttcaggatttattttaaagtacaatgctgtcagtgataatatccatatgcctaaaaggaagaccagctaatataactattattcaaatttatacaccaacaattaatgccaaagatgaagaaactgaagatttttaccaacttctacagtctgaaaatgatcaaacgtgccatcaagatgcattgaaaattagtggtgattggaatgcaaaaggtagaaacaaggattggtagttggaaaatatggccttagtgataagaaatgacactggtcaatactacatacttttttatttttattttggcatttactgacagtgaaaaattcatgtatcttctcagttttttaaagtgaactgaattgggaggcaacttcctctgccagttcttcaaatattcaaatatagtagtaacaataataaaaagggagtttatatggaaaagataaatttgttagtccaagttcagtaaacagacattgtatgcaattcaccaggtttcagtaataatgtaaggccctcacagacatgaataatgtcttacaggccactgtacaccatgccatgcacaaacatagaagtcatccaataaatgtccagtgttgttgaacatgacgatgctggttgaaggatgtcaccttgtttcacctctgatgacagcctgtgtaattacgagaaagcttaacgctagaatacttagatattcctaagcaatttcaatcgaaaaaaaaattttaagcaagaattttactatcataaacataaagcaaagaattgatatatttgcaagaagaaaaaagcaccattaaattgatttccactcctaggaaatgagatttggcatacttatcctttaactgatatgcccccccacacacatatgtgagagcgtgggcacatgcaaacacacacctcacactgaagcacacttatttttaattaaaaaatattttttattgtgttttaagtgaaagtttacaaatcaagtcagtctctcatacaaaaacttacatacaccttgctatatgttcctagttgctctccctcaaggagacagcacacttctcctctccaccctgtattccctgtatccactcagccagctcctgtccccttctgccttctcatctcacctccagacaggagctgcccaagtagtctcaccagtatcattttctgccttatagtacagtccaatccctgtctggagagttggctttgggaatggttctagtcttgggctaacagaaagtctggggaccatcacctctggggtctttctagtctcagtcagactattacgtctggtctttttacgagtatttgaggtctgaatcccactgttcttctgctccatcagggattctctgttgtgtttcctatcagggcagtcattggctatagctgggcaccatctagttcttccggtctcagggtgatatagtttctggtttatgtagtcctctctgtctcttgggctcataattaccttgagtctttggggttcttcattctcctttggctggtgggttgagaccaaatgatggctgcttgctagcatttaagaccccagatgccactcaccaaagtgggatgtagaatgttttcttaatacattttgttatgccaattgacctagatgtccccagaaaccacggtccccaggcccccgtccctgctactctggccttcaaagtgtttggttatattaaggaaacttctttggttttgttttaatccagttgtgctgacctctcctgtatcatgagcacgccgacttttaagtcagaaagttctcttcctaaagaacttctggagacatagagacatgctcctaatcaaagttctctattcctcccaccttcctcctttaagggttacctaaaagtaaagctctaatgaggcatattagttgtactttggaaaatcagagatggattatctaattctcttgagggttcatgtcagaaaaaaaagaagcctcatctatttgcacctcaatgtaacttaaaggtaaagcaggaatactacattgtttttccctaggacaatttacataacatcttctctctgggagttaggtacaagtcagggcataaagtaggccctgattgtgtgagggttttactgacaaaattttgatagcaatattgtcctggtgtgcttttttacattaaaactattatttttacccctaccccctggaagtagcaggaaattttctttcgaggctgcttctctgtcatgaagtgggatgtacattctgacaatccactggaagtcacagtgggagtacagaagactagtgcaaggtgaagacaccttgtagccctgccagatgattcatcttggttagagaagagaggaaatttagataaattagcaggagataatatcctgaaagacagacaattagacatgtcagcatatatataggacaaaggtattatcaaagtgcatctaaagcttggagtttcaaaatgggccaaccatttttttcatgtaaaatctctatgcatttgaaggatgatgaactgggaaaattgttccggaggcaaatggctctatcagagggggtctcctaacttactccagtgggtgctcttctagatcccaccaatggtcatctaagtgccaagcaacctcctgtatcctctgctgccataaaaaaaaaaaaaaaaaaattgctgccataaaaaaaaaaactagtgccataggcaggggcaaaatataaaactcatcgctgagctggattctacctccagggctgtcatttatgggaaagtaaagcccacttgccttacctgagacatcatttcctcatgtgcaaaatgaagtggtgaatgttgaagggacttttcatctctaatagtcagtaacttcaaataacctaagtctttccctccactccttttcagtacctaatacttgccaaccatcctgttcaactccatgtaaaaactgactttcaaatgtcacacaatcttttccttagaaaatcgtgagaagcatggattggccatctcatgtacactgatatgacaataaacaggtggtaaacatagcctaccctcctggctcctcaagttaattaggaggttatacaaccccttccaagaagccctggtctctaatatacaagataatcatgttataaacacctcaccacttaaaaacactaactctagaggcagagtcaaggtggcggaatagacagacgcttccagtgaggcctctttacaacaaagacgtgaaaaaacaagtgaaacaagtatatttgtgacaagctgggagccctgagcatcaaaggcaagcttagacaatgaactgagggacgggggtggaaaagactgttcagaagtggagaggagttattggacctgaattgcggggagccctcaggcaccatacctggggtggaggcggtggtggcggagggctggtactagcgttcagctgcagtttcctcggagaagaagccagccacacaccctactcacacctccggaacctgaggagaatgtcgctctcaacaaaagctaagtacttgcatatattttactgtgcccccccaccaccctgcaagccggcttcagtggctgaatccctgggccagagatagaacctggtgagcacctacagccattctcccagtcttggggaaggaaaaaaatttgcaattggggggaaaagataatttgctagctccattaaccgggggagctcaggacagaagcagctcctgtctaggcataagccgtctgtggaccttgagcacctttcccttctgcatggacctgtgtgggcctattttgggagaataggcccttgttggcaaactccaaccatttcagctgtgcagtggagaggtgggtgtttgacatttgccattgctttgcctattaaacaaggtcctcacctacccacatcagggacctaagactggttgctccactcaggtcacccagccacacgtgacaggggtccaaagataattgatacctcccagtccttacaaccaaaaactttgggtgcccatggtccctctgcagaatccacccaccagcacgctcaagggaacagagacgcattttcctcagagacgcttgggggctggttctcagagcgtgaccccctgctgcaatcagataccggtatatacgccaatcacctctgtccctctaagactgcaggacagagcctgtaccacacacttgatgatcagctacctggaaacctaagctgaattcatacaagaaaactgaatggactcctagactgatatacctgataacagttctagccagctggggacaggacaccacagttccaaaggtgaaaataatcaagctagcccactcaagcaacccataagggtataccaaaacaagacaaagcaagcagctacgacacagtaagcaagcataaactaatgcaatgacttatagatggcttggagacaacagtcaatatcaagtcacataaagaaataaaccatgatcacctcaacaggctctcaaaacaaagaacccagggatcttctagatgaaaatgcattcctggaattaccaggtgcagaatacaaaagttcaatacacagaacccttcaagacatcaggaaggaaatgaggcaatactcagaacaagccaaggaacacatagataaagcaactgaagaaattaggaagattattcaggaacataatgaaaagtttaataagctggaaaaatccttagacagacagcaattagaaattcagaagatgaacagtaaaattccagaattagacaactcaacagaaagtcagaggagcagaactgagcaagtggaagctagaatttcttaacttgaagataaatcatttgacactaaaatatttgaagaaaaatcagataaaagaattaaaaaaaaatgaagaaaccttaaaaatcatatgggactctatcaagagaaataacctacaagtgactggaatccaaaacagggagggataacagaaaatacagagaaaatagttgaagatttgttggcagaaaacttccctgattttgtgaaagatgagaagatacctatccaagatgctcatggaactccacgtaaggtagatgttgaaagaaagttaccaagatatattataaccaaacttgccaaaatgaaagataaagagagaaatataagagcagtgagggataaacgaaaagtcacctacaaaggagagccagtaagaagaagctcggactactcggcagaaaccatggaggcaagaaggccatgggatgacatatttaaaaaattgaaggaaaaaattgcctgccaaaaatcatatatccagcaaaactgtctcttaaatatgaaggagaaattaagacatttccagataaacacaagtttagggaatttgtaaaaaacaaaccaaaactacaagaaatatactaaaaggagttctttagctagaaaatcaataatatcaggtatcaacccaacactacaacactgggcagaacaaccggaagtcaacccaaacagggaaatccaaaaaaacaaagcaagattatttaaaaaaaaaaaaaaaaaacccaacacagggtaacggcgatgttattatacaaaagaagacaacattaaaataataacgagggactaagaaatgtattcatacaccttccatatggagaggaagatacgacgatacaaagaaataaaagttagttttaaattgagaaaaatgggggtaaataataaggtaaccacaaaggagacaaactatcccactcatcaaaataaaatacaagggaaaaatacagactcagcagaaacaaaatcaacaacaacaaatatgaggaaaggacaacacataaagaaaatctactcagcacacaaaatcaagtggggaaaaaaactgtcaacaacgcacaaaaaaagacatcaagatgatagcactaaattcatacctatccataattaccctgaatgcaaatggactaaatgcaccaataaagagacagagagtggcagaatggattaaaaaacaagatccatctatatgctgcctacaagagacacaccttagacttagaggcacaaactaaagctcaaaggatggaaaaaaatatatcaagcaaacaagaatcaaaaaagagcaggagtggcaatactaatttctgacaaaatagactttaaagttgaatccatcagaaaggataaggaaggacactatataatgattaaagggacaataagccaagaagatataaccatattaaatatttatgcacccaatgacagggctgcaagatacataaaacaaactatcagcatcgaaaagtgagatagacagctccaaaataatagtaggtgactccaacacaccacctgtggtgaaggacaggacatccagaaagaagctcaataaagacacggaagatctaaatgtcacaatcaaccagcttgacctcgtagacatatacagaacactccacccaacagcaaccaagtatactttcttttctagtacacatggaacattctctagaatagaccacatatcaggtcataaagccagccttagtagaatccaaaacactgaaaaattacagagcatcttctctgaccataacgccgtaaaagtggaaatcaataacaggaaaagtagggaaaagaaatcaaaaacttggaaactgaacaataccctgctcaaaaaagactggatcatagaagacattaaggatggcataaagaagttcagagaatccaatgacaatgaaaatacttcctatcagaacctttgggacacagcaaaagtggtgctcagaggccaatttatatcaataaatgcacacatccaaaaagaagaaaggccccaaaccaaagaattatccctacaccttgagcaaatagaaagagagcaacaaaagaaacccagaggcaccagaagaaaacaaataataaaaattagacctgaaataaatgaaataataataaaaaaaatgaaatagaaaacaggaaaacaattgaaagaataagaccaaaagctaattttttgaaaaaacaacaaaattgataaaccactggccaaactgacaaaagaaaaacaggagtggaagcaaataacctgaataagaactgagatgggcaatattacaaccgacccaattgaaattaaaagaatcatatcagattactatgaaaaactatactcaaacaaatttgaaaacctagaagaaatggatgaattcctagaaacacactacctacctaaactagcacaaaaccaaaccaaaacaaacccactgccatcaggtcgattccgacccatagcgaccctataagacagagtagaactgccccatagagtttccaaggagcacctggcggattggaactgccgacctcttggttagcagccatagaacttaaccactacaccaccagaactaacacaaacagaggtaaaacaactaaatagacccataacaaaagaagagattgaaaaggtaatcaaaaaactcccaacaacaataaaaaaaaagccctggtccggatggcttcactgcagagttctaccaaactttcagagaagagttaccactactactaaaggtatttcagagcatagaaaaggatggaatactaccaaactcattctatgaagccaccatatccctgataccaaaaccaggtaaagataccacaagaaaagaaaattatagacctatatcccccatgaatgtagatgcaaaaatcctcaacaaaattctagccaatagaattcaacaatgtatcaaaaaaataattcaccatgaccaagtgggattcataccaggtatgcagggatgcttcaacattataaaaacaattaatgtaatccaccacataaataaaagacaagaatcacatgattttatcaattgatgcagaaaaggcatctgacaaagttcaacactcattcatgataaaaactctcagcaaaataggaatagaaggaaaattcctcaacataataaagggcatttatgcaaagccaacagccaacatcaccctaagtggatagagcctgaaaacattcccattgagatcaggaaccagacaagccactcttattcaacattgtgctggaagtcctatccagagcaattaggctagataaagaaataaagggcatccagattggcaaggaagaagtaaaagtatctctatttgcagatgacatgatcttatacacagaaaaccctaaagaatcctccagaaaactactgaaactaattagcagagtattgggatacaagataaacatacaaaaatcagttggattcctctacaccaacaaaaagaacatcgaagaggaaatcaccaaatcaatgccatttacagtagcccccaagaagacaaatacttaggaataaatcttaccagagatgtaaaagacttatacaaagaaaactacagtacacttctgcaagaaaccaaaagagacttacttaagtggaagaacataccttgctccgggataggaagacttaacattgtgaaaatgtctattctaccaaaagcgatctatacatttaatgcaattccgatccaaattccaacgacattcttcaatgagatggagaaacaaatcaccaacttcacatgggagggaaagaggccccagataaataaggcattactgaaaaagaagaacaaagtgggaggccttactttacctgattttagaacttattatactgccacagtagtcaaaacagcctggtactggtacaacaacagatacatggaccaatggaacagaattgagaatccagacagaaatctatccacatattgagcagtggatatttgacaaaggccccaaaacggttaaatggggaaaagacagtctttttaacacatgttgctggcacaactggatatccatctgcaaaaaaatgaaacaaggcccatatctcactccatgtacaaaaactaactcaaaatggatcaaagacctaaatataaaatctaaaaggataaagatcatggaagaaaaaatagggacaatgttaggagccctaacacatggcagaaatagtatacaaaacattataaagaatgtagaagaaaaactagataacttggagctcctaaaaatcaaacacctatgctcatccaaagacttcaccaaaagagtaaaaagactacctacagactgggaaaaagtttttagctatgacatttctgatcagcgcctgatctctaaaatctacatgatactgcaaaaaactcaactgccaaaagacaaataacccaattaaaaaatgggcagaagatatgactagacacctcactgaagaagacattcaggaagctaacagatatatgaggaaatgttcacgatcattagccattagagaaatgcagatcaaaactacaagaagatttcatcttactctaacaaggctggtattaatccaaaaaacacaaaagaattaatgttggagaggctgtggagaaactggaacacttatacactgttgggaatgtcaaatggtacaaccactttggaaatcaatttggcgcttccttaaaaagctagaaatagaactaccacacgatccagcaataccactccttgcaatataccctagagaaataagagcctttacacgaacagatatatgcacacccatgtttattgcagcactgtttacaatagcaaaaagctggaaacaaccaaggtgcccatcgatggatgaatggataaattatggtatattcacacaatggaatactacgcattgataaagaacagtgaggaatctgtgaaacatttcataacatggaggaacctgaaaggcattatgttgagtgaaattagtcagttgcaaaaggacaaatactgtataagaccactattataagaacttgagaaacagtttaaactgagaaaaaaacatttctttggtggttacgagaggggggagggagggagggtgggagaggggtattcactagatagtcgataagaactactttaggtgaacggaaagacagcacacaatacaggggaggtcagcacaattggactaaaccaaaagcaaagaagtttcctgaataaactgattgctttggaggccagcgtagcaggggcaggggtctggggaccatggtttcaagggacatgtaagtcaattggcataataaaatctattaagaaaatattctgcatcccactttgaagagtggagtttggggtcttaaacactagcaagcagccatctaagatacatcaattgttctcaacccacctggatcaaaggagaatgaacaccaaggacacaaggtgattacgagcccaagagacagaaagagccacatgaatcggcaactacatcatcctgagaccagaagaactagatggtgctgggctataaccgatgactgccctgataaggaacacaacagcgaacccctgagggggcaggagagcagtggggtacagaccctaaattctcataagaccagacttaatggtctgactgagactagaaggatcctgatggtcatggccctcagaccttctgttggcccaagacaggaaacattcctgaagccagctcttgagatatgggttggactggacaatgggttggagagggatgctggtgaggagtgagcttcttggatcaggtggacacttgagactatgttgccatcttctgcctggaggggggatgagagggtaggggggttagaagttggcgaaatggacatgaaaagagagagtggagggagagagcgggctgtctcattgggggaagagtaattaggagtatgtagcaaggtgtatatgtgttttttgtgcaagacggacttgatttgtaaacttacacttaaagcacaataaaaattataaagaaaaaaagaatactaactctatggggacgtcagcacaacttgaccaaggcaaggtcatggcagctccaaagacacatccagactacctgtgggactgaattactggctgagggctgggggccatgatcttgggggacatctagctcaattggcataacatagtttataaagaaaaggttctacatccaactttggtgagtagtatctggggtcttaaaagcttgtgggtggctgtctaagatacttccctggtcccactctatttagagcaagggagagttaagaaaatcaacgacacaagggaaaaattagtccaaagaactaatgggccacaactaccacaactttcaccagactgagtccagcacaaccagatggtgcctggctaccaccaccgactgctctaacatggatcacaatagggagtcctggacagagctgggaaacaaatgtaggacaaaattcaaactcacaaaaaaagaccagacttactggtctgacagagactggagaaaccctgacagtatgacccccagatgatcttttaactcagtactgaagtcactcctgaggttcaccttttagccaaagattagacactcccattaaacaaaacagaactaaataggcacaccagcccggggcaaggactagaaggcaagagcggacaggaaagcttgtaacgcagaattcaaggtcgagaaggagagagcgttatcatgttagggtgggcaatcaatgtcttaaaacaatatgtgttctaattttttaatgagaaactaacttgctctgtgaatcttcatctaaagtacaattaaaaaaaaaaaaaaactaacatattctggctgtaactttcaccatgctgaaggacactgcccagatttgtgtctgtccttcagcctatcaaactcagttggctttgtgtacccaggactattccagacactggcagaagagtcagaagcatttatggatcaggccactctggcaactcagccctaagtggtaggctttgaacttggtgagctcagtggtgtttactgggaggaccagcccaagggtgcctggctgtgcagatcttttctgtcagtcttttattacctacctgtcccatgtcctcagatcctctcaacagagtcttagcctgttttctaacccctcattgcctcctcagcaaagagctcactgccaagccatgggctgaatatggctgggagattcccaaagccttgacaagttaggtaaacctcacacagcttttgagtggcacagccagatctgttggtctctaaaagctctgtgcttactcagaatcctctgcttcctctcaccaaagtaccccaaatcctctgcttcctctcccaccagtacccataaccctctagtgcctctcaccagagtgcccataatcctcttcttcctctcaccagagtacccatagtcctctgctgcctctcaccataacacccattatcttctgctgtctctcaccaaagtatccataggatccaaggtccttcctattcatgtgaattctactgtctttgaaggaccatctcaactcccaccttccccagaagctctgcatgcctcctatacagacaggcctaaactggctactctggggacaggagcaggtagaagattaattaaaacatgagtgcagctccaggaagcttcagcctggtgattcagaaaagtttacagctgcatctaatgccttgtaccatagtggttctcaacccaagctgcacattagaattgcctgcggaggcctggaagctcctggtacccaggctgtccccagaccaattaaatcaatatccctggtacggatcctgggcatcagtattttttaaaactgtccaggtgatcccaaggtgcagccaaatttgacaatctctagtgtagaatgtagttaatgccacctctggaataccatgggatttggaaccaaaagaccaagaccaccatagcctctgacttactgctggaccctcagaaaatcaactgcctctctgaaacctagtgtctttgttgtgaagtggatttgaacctcctgccactcctattttgagggtttaatgtgaaaatcaaatgagacacattgtgaaagtgccttgtaaattgtaaaacacatattattatcgtgataattttcactactgatcccccaactgtgatgttcaaacactccgaacagaaagcataataaaactgcacagggaagagaaaatacactcacagtaggattagaataattaaacatagtgactcaagagaaatgcagcagaattcatatttttacaagttattttgtatatttacttttacaagtaaatgaaacaaacaaggctgtaggggagtacctgcaaatggaattgttctcagatcatcacttagaattacagcagaagcttactaattcagactaaagggtaggctagcctttactgaggggaacagttctactgtgctatttattaatttagcacaggaacaaaatttattttggggtaggaggcaagcttatcacaaagaatgcatttggaaaaacatattttgatctatttataaaactgcatcatcatgaatgagactcttagctattcatttaaacagaggaggcaagaacaagagccactggaagatctcaattcaataggttcattccaaaagtccctttgaacttgtcagttggatgctgggtgcctccccacagcatacatgcagtaaatggtggcaggggtggcaggacaggccttcatagttatttatgatacgggtattaccagcctgaggcccggatcctgagagactgagggaagggggcaagaggagcaacagttttcccctctttctgtaagtgtatgtcacctggacaaccctggaaatgatggctgtgatctgcacttgctgcatttctccttgcttctgcactcctaggctacctcctaatgcctctcttccctggcatccctggctaacatgaagcctcacccagatttactctaacttacaataacacagagtaatcctaaattaattattttctcatccccttctccaaatcccagattctaaattccaactttctgggtagagttgatatagccaagctctcagatgtagctggttcacactaatatgcaaatgaccctcccctctaatgtcttttctcctctatcttcttaatttttttccccctgacatggaatgatgctttaattgatggaatttcagggaaacagatccaagtgagtgaatattggtagatagggagtggggatgacagactgtgggcaagagaggtcaccaccaaggaggccagtcctgcctgagaacttgaccctggatttaacactcccaaaatgtccaatgtagggtaatgctattcagctatatacattccctcctaatggagtgagttttgttctttcccgaagcatgctggggatgcattcaggatggactcaggctaaggtacaaggccagaagtggcatgactgggctggtggccaaggccaaggaacaccttagcaacaagaaggaaaacatctggggctggacgtgaagtccctgagaatgctgactgcccaaggatgtgggagaaaaacaataagccttggtcccagctggaacaatatataagcttctgtcccttgctaggtggttgcagagcactaaactggtccagccgccacctgggtcacggtcccgtaagtaagcttcccaataagccatgtgtcatgatcactgattctggagtctttcttcggtctcttggagccgtggctgaccctgggttcaggtgccactgggttgttacccaacatccacatctctcatatcttcttcattttctctaattctggacctttaggtttacaatagcttctgtggtgctagccactgaggtgaggtagggtggaacaggataaggggaaaagtttggctgtgtaaagcaaagaatagatggatagttagggatagctgaaaactaataatagcagctaccatttcttgaatactagccatgtgctaagtactttatcttacattatttacaactgttaaacgagatcgtatctggggaagcattttgaaaatagcaaccttccgtttatccttaatacacccattacaaagaagaaactgagactactcaagctgattaatcaagttgcccaagatgaaaaactgagtaagaaaaaggagattcatttcttggtctctgtgactctgaatttttttttttttttctcactgaagccctgacatgaattcactacctttttaagtgtggtctctagaaagtgaggggtgtcttaaattgtctacaatttctatttttctttcttcacgtagtttctatattcatctacctcttatacggaaatcctggtggcgtagcagttaagagctacatctgctaaccaaaaggtcagcagttcaaatcaaccagccactccttggaaaccctatgcagcagttctgctctgtcctatagggtcactatgagtcactgagtaatgtttgcaacagatatgtctgaacaaatgactgacttgggaaaaacacatgttcagtgaacttctccactatctccacccttgcagggcctgagaggtttacacatcctagtgcaggtggtgcaaatcctctatcctggacactggcacaactagctcaggtttaagcaattaaagattaggtaacctctaatcttggacactagtaaaagtattagtggcagaagaaacaaccactgtacttctattgaccttttactcttcccctggtggtgaggtggttaaaagcttggctgctaaccaaaaggtcaacagttggaatccaccagctgttccttggaaaccctagagggcagttcttctctgtcctatagggacactatggatcggaatcaacttgagagtaaggagatttgatttctatttccagtaagtcaaacttccttaagaaccttctatctgctccccgcttcacagatctgaggtgctagaaaagatcctggagattacgaaattgaccagttcatactgttagctacctattagaatcacttgggggaaaacctacagaggctcagatgccacagactctgtggaattgatctgggttgagccccatgcaggctgagaaccctgatcatagtccaagcccccccttttttttttttttacagaagaaccgtgagactgatgttttcttgagcaggtggccacctttcgcaagcactccaaaactatgatacaggtcacagcacaaacttctaagcctatggaggctgtggttctgtctctcagctctgtctgtcaggccaattaatcctgcaatggtgtcaatacagacagtagacccctggctggaccgtttccctctcaccccatgcctgcaattcctcttcattgctatgctgggtgcactgtgcagacaaaatcaataaggacaatatagcaaataggagacaaatctcattaatgaaaatttttctttttttgcagcaggcacatttccttttttttcttaaaaaaaaaagaaaaaaatcttttttttttttttttttaactatctcctaattccaaaattgtacattttcccacacagaccactgactctctatttcataaagtactgataagccaagtcttaaaaccatagttttgtatctcaggtgagttaagaaaacacagtcaaagttcaaggattgatagcatcgtgattttgctctgttcaaattcatttgtttcctgaaggaaaaaaaaaaaatataactgatatgtctggttagtgatctgagatgcccaaagtattttcccaaaccacacacttgctgaagagcagcatctctgaaagtctatctacggaacctcctgacctggagacacttcctggatattctataataaagatagcccgctgcagagagttgctggggaagcgctgcatagatgggcaataacctggttacctgcaggaagggaagatacttttccagggcacaattttattcataggttacattttgtctgaacagagaaaccatgttctccttttgcttggtgttcagttcagggtcaaaacatctaacaggaaaagtattcatgtctgagcacagaatttaggaagaaattgagaacaagaagtagagtccaaaaaaaaaaaaaatttagacccaattatattaggagatcttgaattccttaaaagaacataggcaatgatataaagtcttagtgatattatttaaaactcgtattttcttttaaagtatttaatatgatcttagaattacaaaagagaataaatacccttggtattgactgcatctcccaaaaagagatgtccaggtcctaaggcctggtaactgtgaatgtggccacatgtggaaataggtctttgcagaagtgagtgatctagaggtcaccctgtatttaaggtgggccctaaatgcaatgactggtgtctttgtaagagaaaagagaaggagatttagactcagggagaaatggggaagaaagccatgtgacaatggaggtagaaactggagtgatgcagccacaagccaaggaaagacaggagccaccagagctgggagaggtaaggaagaattcttccttagagccttggaatttcagacttatagcctccaaaactccaagagaataattttctgttgtgtaaagccaccaagttagtggtaatttgctggggtctgtgtgccagttggagtcctgatggcacagtggttaagagctcggttgctaacgataagattagctgttccttggaaaccctatgaggcagttctaccctgtcctatagggttgctgtgagttggaatcaactcgatggcaaagggtgtgccaataagcaagtgctcccaaatgagactacttagaaaatttctagaattctgaggaatatttctctaggttttaaaatataaacttcatttttactgagtaatttccaaagaaaatgaatgctcatcctttataaagcacaatatttttggctgtcctgaatctaagcctacactttggttttgagcaaccctgccttcttgatctaaacttgctatatgaataaaggatgttgcttaaaactcaacaaaacaaaaagtaagaaagaagattgcttcctcaaggaacattttcagccgtttaaaacttaacacacaattaaagtacttcctttatcaccatcacctacttcagcagctattcagagttcacagcaattcaaataaaacgtcaagtttctcaagacagaatcaaagccatttgagacttcccgagattaaaggccacagacataaataaaacactcaacaataaaatttcatacctccattgtgtattatacgcgactgtttgtcgcactgtggaggcttgcatgttaccatggtgctggaaactatgcgcacgtattcaaacaccaggagggttacctatgctggacaggtttcagctgaccttacagactaagacagactaggaagaagggctcggcggtctacctctgaaaagaattagccaatgaaaacctcatgaatagcagtggaacattgtctgatatggtgccagaagatgagctcctcaggttggaaggcactcagaataggactggggaagagctgcctcctcaaagtagagttgaccttaatgacgtggatggagtcaagctttcaggaccttcatttgctgttacggcaggaatcaaaatgagaagaaacggctgcaaacatccattaataatcacaatgtgaaatgtacaaagtatgaatccagaaaaattggaaattatcagaaatgaaatggaatgcataaacatcgatatcctaggcattagtgagctaaaatgggctattattatccattctcaatgagacaatcatgtggtctattatgccaggaataaaaacctgaaaacaaatggcactgcattcattgccaaaaagaacatttcaagatctatcctgaaatacaaccctgtcagtgatagggtaatacccatatgcttacaaagaagaccagttaatacaactattattcaaatttatgcaccaacctctaaggccgaagatgaagaaattaaagatttttaccaacttctgccatctgaaattgatcgaacatacaatcaggatgcattgataattactggtgattggaatgtgaaagttggaaacgaagaaggaacagtagttggaaaatatggccttggtggtaaaaacgatgctggagactgcatgatagaattttgcaagaccaactacttcctcattgcaaatagctttttcaccaaaataaatggcaactataaacgtggaccttgccagatggaatacacaagaatcaaattgaccatatctgttgaaagggaccatggaaaagctcaattatcatcagtcagaacaaggtcgggagccaactgtagaaaagaccaccaattgctcatatgtaagttcaaattgaaactgaagaaaattataagtccgtgagagccaaagtctgacactgaatatatcccacctgaatttagagactatctcaagaatagatttgacacgttgaacattaatgaccaaagacaaaacaagttgtggaatgacatcaaggacatcatacatgaagaaagcaagaggttattaaaaatacaggaaagaaagaccaaaatggatgtcagaagagactctgaaacttgctcttgaacttcaagtagctaaagcaaaaggaagaaatgatgaagtaaaagaactgaacagaagattacaaagggtgacttgagaagacaaagtactataatgacaggtgcaaagaattggagatagaaaaccaaaaatgacaaacattcttggcatttctcaagctggaagaactaaagaaaaaattcaagcctcgagtggcactagtgaaggattctacgggaaaaatattaaacaatgcaggaattaacaaaagaagatagaaggaatacacagaatcactataccaaaaagaaatggtccacattcaaccatttcaggaggtggcatatgatcaggaactgatggtactgaaggaagaggtccaagccgcactgaaggcattggcaaaaaacaaggctccaagaattgacagaataccaactgagatgtttcaacaaacagatgcagtgctggaagtgctcacttacctatgccatgaaatttagaaggtagttaccttgacaatcaactgcaagagatccacgtttatgcctattcccgagaaaggtaatccaactgaatgcagaaattactgaacaatatcattaatagcatacgcaagtaaaattttgctgaagatcattcaaaagcagctgcagcagtgtatcaacagggaactgcaagaaattcaagccgtattcagaagaggatgcggaacctctgatatcattgctgatgtcagatggatcctggctgaaagcggagaatacctgaaagatgtttacttgtgttttattgactatgcaaagccatttgactgtgtggatcatagcagattatgggatagcactgtgaagaatgggaattccagaacacttatttgtgctcctgaggaacctgtacacagatcaagagccagtccttcaaatagaaaaaggggacactgtgtggtttaaagtcaggaaagttgtgtttcaaggttgtatcctttcaccatacctattcaatttgtatgctgagcaaataatctgagaagctagactctgtgaagaagaatggggcttcaagattggaggaagaaagaactatacagaagaaactacttaagtagaaaaacatatcttgctcatggataggaagactgaacattgtaaaaatgtctattctacccgaagcgatctataggtacaatgtaatccagatcgaaataccaatgacatttcttgatgagctggagtatcaaatcaccaacttcgtatggaaggggctgaggtcccagataagtaaagcattactgaaaaagaagaacaaagtgggaggcctcacactacctgattttagaacatcttataccgccacagtaatacagactaacttgatttgtaagctttcacttaaagcacaattaaaaaaaaaagattggaggaagactcattaacaacctgcgttatgcagatgacacaaccttgcttgctgaaagtgaagaggacttgaagcaattactgatgaagatcaaagaccacagccttcagtatagattacacctctacataaagaaaacaaaaatcctcacaactggaccaataagcaacatcatgataaatggagaaaagattgaaatcgtcagggatttcattttacttggatccacaatcaacacccatggaagtagcagtcaagaaatcaaaagatcctccacattgggcaaatctgctgcaaaaggcctctttaaagtattgaaaagcaaagatgttaccttgaaaactaaggtatacctgacccaagccatggtgttttcaactgcttcatattcatgagaaagctggacaatgaataaggaagaccaaaaaagaattgacgcctttgaactggggtgtgggtgaagaatattgaatataccatggactgctaaaagaacaaacaaatcaacagacacttagtagaaatttagatcaattccagttggtgtgcactcagtaaataacctcattgttgatctatacattcacatttgttgaccatgccttatttcagtaaaagagaagaaaatgctttttctgaataacttgcatagagtcatgatcaggctctctaaagagttcagctctcttcactaattaacttccagggtacctgctgaaacaggtattatgtgtgtaagaatcagtgtagatgaatacagcatgtactggattggaatttgggtctcttaactcccacctcattttctcctttgaaaaatgagagaacaaggatgggtactgaggtggctcactgggttccaatgtagatctatggaccaaaagaatccatacgacccatcaaacttggaaacaacaaaacagagttccagccttgatcattctaactcagtggacctaaggaggtgctcagataactgtagctttccaatctgccaggtgattctgatacacagccaggactgggatgaaaagaaatagagtcaggtcccttgctgctcttgaaaactacaaactcttcaatcttgccttgaacagtacatatgtttatgaaaaaaaaaaaattttgttgtaattttggaaaattcacaccttaaatatactagggacatagctacttaaaggaccacgtgagacaggacatcttttgtaaatgattgattaataataaaacttttttctctagttcacttaaatttttagattcacttatctatccacctatggtcacctgatcttcaacaagggcccaaagtccatcgaatggggaaaagacagtctttttaacaaatgatgctggcaaaactggatgtccatctgcgaaaaaatgaaataagacccacacctcacaccatgtacaaaaactaactcaaagtggatcaaacacctaaatataaagcccaaaacaatgaacttcatagaagaaaaaataggatcaacactagaggccctaatacaaagcattaacagggtacaagccacaaccaacaacacacaagctctagaggataagctagataactgggatcttctaaaaattaaacacttatgctcatcaaaagacttcaccaaaagagtaaaaagagaacctacagacttggaaaaaaatttttgcttttacagatcagacaaaggtctaatctctaaaatccacaagaaaatccaacacctctacaacaaaaagacaaataatccagttaagaaatgggcaaaggaaatgaacagacacttcaccgaagaagacattcaagtggccaacagacacatgaggaaatgctcatgatttctagccataagagaaatgcaaatcaaaaccacaatgaaatatcatctcaccccagcattactggcacgaatcaataaaacaggaaataacaaattttggaaacgctgtggggaaatcagaactcttatgcactgctggtgggaatgcaaaatgatacaaccattttggaaaatggcatggcacttccttagaaagctagaaatagaaataccatatgatccagcaatcctactcctaggaatatatcctagagagataagggtcttcacacggacagacatatgcacacccatattcaccgcagcattgttaacaatagcaaaaagatagaaacaacctagatgcccatcaaaagatgaatggataaacaaactgtggtacatacacacaatggactattacacaacgataaaggacaatatgaatctgtcaagcatctcataacatggatgaatctggagggggttatgctgagtgaaatcagtcaatcacaaaagggaaaatattgtttgagaccactcctgtaaatactcatgaaaaggtttacatgcaaaaagaaacaatctgggatgcttacaagggaggggagaggggaggatggaaaaacacttaacagacaatagacagtacacaatactggggaagccagcataacctgtacaaggcattgtgcatttgttaaccaatgtcatggaacaatgtgtgtactgtttggtgagaaactagtttgttctataaaatttcacctaaagtacaataaaaaaaaaattaaaaaaatttttagattcacttcaagtacacttaaatcattacagggaaaaaaagaagtgaggtaaaaagtcaaaagtttcctttaattctggatctacctctgatacgaattataatttgggaaagtcaagcaacatctctgccaggtagatcttgggctttagtgaggaaggtcccaggctgtgtcatgtgctttctgtatacagaaaaggaactgattatatattgatgattgaacaattttagaataaccagaaaggttctcttttatccggcatcacttgtttagtcacatctgagaacacttttaaggaggtatttaatgaaaaataatttttgattttcaattatattacttcacatggaactaacttgggtaacatagtgtactgcttcaaatgtaggctaaaggatcgatgagtgagcacttgtagaataagaggttttgaacaagattagggatcacaaatgctaaagcctacagttgccaagcaactgttgaagtgggccaggctaaatggtttaagtgggccaggtaagatgaagatcgaagtttaagtttactttgcttttccacttttcataagaaaatggttagagagagtgtttgcgtgtgtgcgcgttttctttattaaaagacgaaagccttgcctttgaaagccacgccatggctgcatgccaggggacagcagggagtggtgggggctgcctagcctctgcctggtctaaaggggccattgttggaaataatggagtagagctcagaaagcccaacagctcagggttctcaaaggaggtgggacagagtaaagaggtgaaaagagccaaacttggacaccaagttgcaatttctgagcatcatctctatgtttctctactgggacaatgactcaccatgtctcttgacaaagtttctgcactccattttcatggcagcctactcagtctgctagagtgcgcaaaggagctcaagtgccttaatactggagatgtacaacctttagcaagctatcaacctctctgtgacttagtttcctcactatagaatggagtaaataacagtaactatttcaaaggggtcttgagaaaatttaatgagctcatacttgtaaaatgttagggtggtggtgttgttaaatgccgtcaagtgggttttgacttatagcaaccctatgtactacagaacgaaacactgcccggtcctgagccatcctcacaatccttatgcttcagcccattgttgcagtcactgtgtcaattcttctagttgagggtcttcctctttttttgaagaccctctgctttagcaagcatgatgtccttctccagggactgatccctcctgacaacatgtccgaagtttgtgagacgtatcctcgcttctaaggagtgttctggttgtacttcttccaagacagatttgtttgttcttttggcagtccatggtatattcaatattcttcagcaataccacaattcagagacatcaatttttgtttggtcttccttagtcatcgtccagcttttgtatgcgtatgaggcgattaaaaacaccatggcttgggtgagctgcaccttaatcttcaaggtgatatctgctttttaacactttaaagaggtcttttgcagcagacttgcccaatgaaatgtgtcttttgatttcctgactgccacttccatgggtgttgattatggatccaagtaaaataaaatccttaaatagatgtcttaacaacattgagtctttcaatacctagtaaaaaaatctctaatttccctcagcagtgttttgcagttttcagtaaagaggtcttatgcttttttttttttttcccttagccttatttaaaggtatttgatgtttttgaaactattgtaaacagtattaatttttaaatttcattttccaagtatttgttgcttatagaaatagttgaccttgtatgttgtagccttgttaaattcacttatttttgcaggttttttctgtgtgtgttttttataatcatgctatttgcaaataaaagtcaaattttggaattaaaaaaaaaatgaaatccttgacaacttcaatcttttctccatttaccaggatgttgcttcttggtccagttgtgaggatttttgttttccatatgttgaggtgtaatccatagtgaaggctgtagtctttgatcttctgcagtaagtgcttcaagtcctcttcgctatcagcaagcgaggttaggatagtggccacatagtaggtgctgagtaaatgttggctgtagtgggtccaagcatcatcagtaggtgtgcttaatgctaccctacttcatgtagagcaggcctcactgtgtagagaagcatcagaatcctagatatctaagagcaggaagaagccctacatgtcatctttttgttgaggttgcctttggtcttgcacatgttttaacgccatcatttaaagactaagaaatttcccataaatatctgaacgtttatctttttctgaaacatgtggccacttaccacaccagtgtgtgtttgagtcatctgaattgtctgcagttgagttgtggtactccctttagaccaggcagaggctgggcagtccctaccactccctgctgtcccctggcatgaaaccgtggcatggctttcaaaggccaggcttttgtcttttaatacagaaaacaaacacacacacaaaccctctctctaaccatttccttatcagaagtggaaaaacagaaagtaaacctagactttgattttcttcttacctggcctacttcaacgatttaacctggcccacttcaacagctgcttggcaaatgtagcttttagcatttgtgatccctaaccttgtccaaaacttcttattctacaagtatgaaaagcaagaagcccagggaatttttttttttatttgaggttataagtcttgttagtggcaaaagcggtatccataatacaggtgtttttccccggttagtgtttctactcatttatgtacttctttcataaacaaattagctaatgtgaatttgattcatgtcacatacggaaaagcaaagccagaacaaggaagcaaggaagaccagtatgggcacaagaggactgtaaatggggtcatctgctgttagtgctatgattatccacatcttactaaggctgcccgtgtttaaatgttttgacaggtgccccctccaaccagttgtttcatttccttgatactgaactgccctctgtaatgtttaatcatattttttttttttccgaacataagtctaacttacttcactaaataaatcggtggcctgggtgaaaagaatatataacatgacaaacctcaaagcacctaaagacaatgatgagaatgatgagatggagaaagaaagcagaaatgaaactgggagacaatcgtacttattagagctcctccaatgacgattcttttaggtcctttaattctccctcatgaaatgcatccatcctaagtggatggatatgtcaccctcccttcacatcatgatgatatttctgtcactcaagtgcttgtctctcccataggaaaaatgataggcacatacatcatatggcctgttaacttaatttactgtcagttattttatttatttatttttttaaattttgaggcagtgacattgtgacttgggatgttagattatatccacaccctaccctgccaccaaaataccccctggattccttctcaattgtattctttgcatctcatttaggaaaatctatgatttaggtctagttctcccactcaacgtctgcccgagctcaaacaggcctttctgagcctcatccttacaaacgggcaggggtcaaatctatttgaaagactgttggaatggacaaatgagatccactttggctaagtgctttgtaaataaaaagtacccaacatatgtgccctgataccaggcgtggtcctaaaacgatggggacataaggtgttctgagaaggcagtcagtcagactcacaggaaagctcatgactctagaatccatttcaagagacaatggaaatgaaaagaaaaagaaaatgaattaccaacagtaagtcctaggcaggaggtagtgtctccagaaacagcggggacaatgccctcctctgtgtccccagaacctgtgcaagctgctattttgtctgttgtcacactgctgcataaatttgattatttgcctcccttgattcccccgccatgacattcaacattttataaactgagctaccctggaaaaggccagggtcagtcattttttgtccctacagcacttagcctggtgtctgctggtgcttctggcctgctaggttaatgctggttacttagtgcaaaagacagaagaatggtcccccaaagatgtccacaccctcatccccagaagctatgaatatgttaccttaatggcaaaagaacctgtgaatatattacgttacatgaggtgaggagatcatcctggattatctgggttgtccattgtaatcgcaagggtccttataagagagaggcagagtgttgaaagtgagaaaaggaggtgtaacaacggaagcagagactggcatgatgaaccttgaggatgggggggggaccatgagccgaggaatgcatgcagcctctacaagctggaaaagacaaggaaactaattcaaccctgaagcctccagaaggtacacagccctacccaccccttgattttagagttttcacccccagaactgtaatagaataaatttgtgttgttttaagccaactatctttgtggtaatttgtcacaggagtgtcttagttatccagtgctgctataacagaaataccacagtgggtattataaccagaggcatagaagttgggattcacaacacgtatggggaggcagggagttcaatccataacattccaccttttggcttccccaaattcatgtcctccccacatgaaaacacattcaccccaccatatcatctccaaagtcttaactcaaagtccaaaatcccctgttctgaatcatctaaatcaaatatgggtgagacttgaggtgtattccagcctggggcaaaattcctcttcatctgtgaacctgtcgtctagattacaaatgatgtgtttccaaagtacagtggtaggacaggcacaaggtagacatttccatcacaaacgggagaaattagagggaagaagggataacaggcaccaagtaagtccaaacccagcagaacaatttacatcttctctcaaggcttgggaataatcctctgttctttgggaccatctgggcagtggccttgccctccagactctgggtattggccatgctgtctagattctgggtggaagcccgctggcccaggtttcggctccaccttccaggcccactgggatagcaactctgcttccttggctttgggcggccccatttccctagcccatctgagtggtgagcctactccttcggccccagcaagccccattcttctgctccttggacatggcagccctgctccctcagattgggcatgggccccttcaccgtagcattcatgaactgcagcctcacactctggtaaggatctgactcttttaaacctatgaggccatggctccattctttgaaactgatgcagccctgcttctgtgctccttccaacagttctgttgatttctgagctgttccaggaatggtccttttcttttcttagaggacaatagatgtagctcttttggactgtttcctgcctatagaattccaagaggcagacaagagttctctccttttgttctttctctatcctcttcagtctaagctgatgggtgttctgctgtggtcgttggttagacccaacagtcacaagcttaatctctttaacaaaaaggtcatgtaggcaagtcctttgtgaaaattctaggacacgtgtccttcgtttgtaaaagagaattttctaaatctttaagttttgttttcattttacacagttcatttttaagtctgtctctttcctctcacattttactgtaagtggcaagaagaaaccatgtggcccctttaagatcttgctcagaaatctccgcggccaaatatccaagttcaccacttacaagttctatcttcaccaaacatttgaacataatccagacaattctttgccactgcataaaaaagcactgttggtcctcaactgtctaacattttcttttaaagcctcaccagaaacacattcaatgtccacatttctagcaaccttttgttgctggctctatatgttttctctaagacaacagagactttctctgtaactctcctcactgtcttctgagcccacgccagaattgtctttgacatccataattctaccaacagtctgtccaaggtaatctaggcttttactattagatactttaaaactctcccagcctctatccattacgcaattccaaaaccacttctacgttgttaggtatccattagagcaacactcccacattttggtaccaaattctgtctaagttatccagtgctgctgtaacagacatatcacacgtaggtggctttaacaaacagaaatttatcctctcacactttaggaggctagagatttgaattcagggtgccagctctgggagaagcctttctctctctgtaggctctggaagaaggtccttgtctcttttagtttctactcctgggcaatcttcatgtggcttggcatctctcttcccccatctctgcttcttttgcttgattgtttaatctcttttatatctcaaaatagactgacttaaaacacaccctacactaatccagtctcattaacataacaaaggcagcccattcccaaatggtattataaccacaggcataggggtttggatttacaacacatatttttggaggcacatttcaatccaccataaggagcaacagaaaacaattacacttagagaagcaagtacatggataattgcaatttgaatggatggatgaacaaatggtacgagccctaggtagaaagtggaaaggttcaggacctgacttaaataataactggctgggtaactttgggccaatcatttaatttctccagacttcctaaatgaatagctgaggctgtggtgttagaaggaccagggtttgaatcagtggcatcactagggaggtgcgggggtggggtgtgtgtgtggagtgaactgagtaacaccagtgccccccgcagtgcatgactttgcctggcccacagccacctctgccactcctcgcagtctgtcaggcattggggtctgctcggttcccagagggcagcccgttggccaactccatggcactgcccctacccgatcccaggatgggcccagcgaggctgcagtaccaatgcaagctgcaggcagagggtggaggtagaggaggtgccagctgtgggtctgaggagccctagggctcagacaggctgcacagtctgccctgagtaggggcgttgcctgcactgcctggttgctgacctgggtccccggtgcaggaggcagtgtggctgccccaccagcccctgtagcaggatgtgaccatcccagggaagccagccaccaccttctgcagagctggccatgctggttctgccactttaaccacatgaaactacgtagatgtacatacattcaggctgtgcataggatatggtaatttaaagatgtaattttaattttgctagttgttcatgtcactatggttgccattgcattcagtgatagatgggaactatgttttatgagttacattagtataaaaaacattcctgaggatcctgtatggactggtatgggaggaggtccatgggaggagggggtgacaccatgagttaccacactgggtgacaccaactgtagtaacaccattggtttgtatctcttttcgggctactttctggctgtgcattcttaagtgagtgcttacctcactgagccttatgtccacatctataaggtggggatagcaactgtatctcccacagagggctgttgtgaggacccaatgaactatagtctagtctcattttctacggctctgagctaggcatattcgaactcatggtaacataaaaatgttatttatgtcacttcatgcaaacttgataaaatgcaaatttcccaaattacaaacgtaatagaaaatctgtcaggcctcaaggggctgtttggttcccagagtacggcccattgcccaactccatggcattgcctctccaccataatggcgtaatggcagagctggtggactgtaaaccactgattgccacatggtagagccgcttcagctgctgaacagaaaaccgcaccaccctttgagagaatccacattgaattgtacaagctacaaatcatataagtgacaaattatgaggggtctacaggaacacatcctttgaacaaaatatgaccatgctttatttcatgcaaagcaattagcatcgggctggctcacagaaagctattattctgctgttattattttagctccatgataaaagcctctgaacaaacactctcattatagaaaatgaaaataagtccactttcccgtgggcctaaactttacatgggcctctgactcctttcaagaaaatcttctaagttagaaaatccaggtcaggtgtgctagtgacaccccatattatacagcaataacattttccagctcttactcaaaacccagcatctagcttcagggaggcgttaactacatgctccattagtatcatcgtgtacacctttcaaggctattttgccatatttaaaaacggaatgaaacaaaaaacaacctattgccatggagtagatttcaactcatagtgaccatacaggacagggtagaacttccctgtagggtttctaaggctatgatctttacagaagcagactatacatctttctcccatggaggtgctggtgggttcaaatcactgacctttcagttagcagcctagtgcttaaccaccgcaccgccagggctccttagccatatttagaatactagaatatgtgacttgaaggggacactcctgtgattcaaggctgtccagcaatacctctcttacccttctctctgttctcatttctggaattccaaaaacacaaggttgtgcttggtacatactaaaagctcataaacagttgttgatagtataaatgacctctatgagtcatgtagcccatgtccttctcccattttacagacaaagtgcccgagaccaatgatagcaatgactgaaacaatccactctgtgaagcattaattcaagttaataactgtcttctccctagagggaagagctaattttctaaaattaatagattgggttatggagaggaaataatcttaaagcacattttttttaaagtgtatcagtttttccaagtagcttccagttccagaaaatgaattctcatggtgatgttaaatgtctaccccacagatttggctgacagcttgtggaaaattataccagaatgatcaaaagaagacaaaaacctggatgaaacagagccacagtgaggacaagtggaaaagctcaagagcgatgctgaattatttagttctaaggaagcctcctattacctgggaggagaacaaatgactcctgttacctgggaggagaacaaatgactcacatttcaaatgcatatgactctttcagtagcaaagaacaatttaatgtagaatcaagttccacttctacttagaatggcaacttgttaccaaagcagacagaatactgagagagagtcagagtcagaagagcctaaaatccacatcttaatgttaggcagccacctctaactcatcagaaacggctgaactgacttgctaggtgaacaccaccaccacccacccccgagaagaagaatccacacactttcctgcaaaagggatgttagcgattattccactgtctttatggagcgaactttaaccttctctaaagtaacttaagccaactccctgcattgtttcactgaatatggacaacagttgtcccatcttcacaaagtagtcactttatgttttaagagtcaactctttaggacatagccttcttaaggctaaatacgcctacatttctaaatttcgtatgatattttgatttttattagactcttcccaatccttatcacatacaagttgggttgtggagcactgacacaaacccagaactcctgtatattagtgagaaattatccttaccagctggtgtgctatgcctgcctccccaaatccacttactttttagctagacaactgtgatggttaagactgtgtgtcagcttggctgggccatgattctcagtgtttatatgtgatccctcccatgattgactctgttgtgagtggccaatcagttcaaagcgagtttccctggaggtgtggcctgcacccaaatataagcagacagtctggctgttttgctcactttggatccgtagctgcctccagttcatccaacctctgactcttgggacttgagctaccagcttatctgtgaaccttgggatttgtcaatcttcacagcctaagagtgggacccctgctctctgaccttcggatcttgggttcgccagcccctgcggctacgtgaatccagagaggcctctatcctgattcatggacttgggatgttccagcctctacaactgcatgagccatttccttgatataaatctcttcatatacttatttatatgctttactggttttgcttctctagagaacccagcctaagacaacaacgtagggcttttcaatgattacctcagatttctacctacttcctacccttcttcagctttttagctttccatccacggcagtgaatgctgggtctctatttgtgattttaagtgattctcattaaacgttttaaatttatctacagtgacttcctgtcctacttctgaagtatttcccattccaaccctgccttaggcttctcatttgtgccacaactcgggtcatgtccttgttcctagcccagccactttgctaatgacaaaggatcctgggataagtgctatcaggagaagtggaatgacttcactgaccacttgctcccttttaacatccttgggctccacacggcccaaagtgtaaggcctgacccatgagcacagcaaacaagccccaacctcgtctggcttttccatgcatcctcaatatcctggtcaaactttttatttcacaaggccgttattcagttaccttgagcttctcgccctctctctatgagccttcaatgaaaattcacaccactggggccttacctaggctgcccttctgcctggaacacccttacccttgttctccattcttggatacacatcaaatcccatacctctgagaagtattcctcaactcctcagacaggatgggtcactctctcttctgtgctccccaagaaggctgtagacgcctgtcttatacatacagcccttatcacagagcactgcaatgtgtttatgggtctctctgaacttatttttcacaccttcctataaccaaatatacaatctgcttcacagtgttgttgttgctctctgtcatcatcaagtcaggccccggctcatggcgaccccatgcacaataggatgagacccttgtgagctacagggcttttactggctaattttcagaagtaaaccaccaggcctttcttcctagttcatcttagtctgggagctctgctgaaacctgtccaacatcatagcaacatgtaagcctccactgatagacaggtgataaccgcacatgaggtgcattggctgggaactgaacccaggtctcccgtattgaaggtgagaatcctacagctgaaccactattgctctcctctgtcacaacagaagttcataaaagaatgagttatgtaaaagtgtacattattctgcaaccagcggtgactggatggtactcagcactggggtttggaacatacttgctccttctttacctatctctgggccaggaggacaaaatcagaggattacaagaaaaacaagctgatgagtacttggctgagaataaggaacatgcggtacctgatagaccattatattaacagtttcttcttttttctgctctggaggtccttgactctgcaatagattgcgtactgtttcttccatcctgaggggggaaaaatatgaaaaatttctttaaagaaggttccctattaatatgggtctgtttagttagtaaaaataatttttcagtgtttatatgccaaacttacacccagaagtcccttttcttgcctctctctttatctcctatattaagaatgtaccatgaagccctttcacatcattcttcaggatgtttctgggttctctttctttctctttactatttgggtccctatctgtggcctcctacctctgtactcatgcaaacgtctctcaatatccctctttaatttccattgctgcctttttactttgacatgatgtcaccacgtgaatcttcttgaaacaccacttcaatttttaaaaatcaattttcaaagataacaaaaattacatgaatggattctctctagtcataaactgccatgtctttccatggtgggtctttccacagcagcacacaaaggtttccttcactcttttctgctgctacctagcatttcatggtgtgaatctgccatcagatatttcaccatttctcaactgaaaagatttaaatcgtttcaaatttttgcaattccaaacaataaatatatttatacttctatctttatgagtatttctgtagctcacaatacatattacatgctataatcctgtttcacttttaatacaaacttccaggtcttcccatttcccaacagtaaagagtaaagcaaacatttccatttacagacacctgctcacactcttcccacttcttggaataccagctccctttcatcttcccattccccatctgtcttttaaaatccacctcaagatttcatttggcgcctatttctttgaattcttagtccttatacattacattattcaatcacttaaacacctcttatcttaacgggcaaatatttcatatatacatgccttgtcttctccaataaatgacaacattttgtacaggaccatgtcacgcatttcttatatatctttctcatttatggataaagtattcactagaaacattacataaatcctttgttaattcattttaagaagtattaagggcttattctgtgccaggcattcactgtgtatattcagactgtgttggaatgacctggtgtttgggtccatccatgaggattcatggcacggacaagatctttggggagcaggagccctgaattaaatgcacagaatgcagagctctttcatctagagcctgagttggttgtatcttccagttccatcctgaagcctgtatttttgtgactcagtataatatcagcttaggatagttgtagaaaaaaaataggttgatctatcttctccctctcataaaggcttctagtgttgtaagttaaagtgcccagaaggcccgtgaatccccttaaatggcaaggtcattacagtggtcggagtaatgtagtttaaactgccaacctttctaacatgggatataactacttagtgacagagcaaaggatcacatgtgaactggaccagtccaaccttagattattaatgggaaatttctgccttcacagagaatggcaccaggacctactcgggctttcaggaagactgggcatgagtgctcctacaagccacatcttcatgcctccatcctggacagcagaacctgctccctatatatttcccaaagcttatgttatttatgataataactcaaattagaatagtacgtttaactcgtcaaagaaatctctcaactattaatcgtaatgtactttgaaaataacattgtctctttgataggtgagaaagctgaggcatagagaggttaggtgtcttatttaaggcatcatggttggttgaagagaaaagttaggattaaaccttttttactgactctaaaaagaacagcctctttcaactagacttgactgacactcagggagatgattttaaatgaataagtgttgcagctcctaactaggagttagcttggtgggtacctgctggatgctaagcccaagaaggcaacactatgggccccaacctggacagagcactgacctggtgaagacaaactaagcttatgccaaaaaaacagttatgaagtcacaaattctgaaatagtaagtgattagagccaactttgaattttctattacattttacataaacagagataacctcttgagtggcactggaatttccatgatgttctcccaaatctgtcataaacaaggcaagtaatggtaacggtgaatggctagcctttgtttctgaaagattgtctactttctttgcaccagaggacagaggctgaggtatatatttcaatcctgatttcactcgttcataaacatctagcttagaactcaaaagtaaaatcttgcctttttctttcagttaaattaaaataaattctgtctcactgcatatcttgctgaattatctctcccgtgtaattaaaatttctatgtgcaagctgttggttcaaaaagaaaaaacatctcttcaccttttccccattcttcttggctttataatttaaaaaagaaaaaaaaaaaaaaaaacggagaaagagggggtggacaagaagttgttcaaacagagtcttaagcaggcccagtaatactgtgaaggttcttctggcactattttatgattaattaaaaccaattacattttcaatctacagcttggaacggagtctcagggacccatcccaacccttggtaaaaaattaagttgtcacatctttgcataacctttatgcatccagtcacagtgaagatgtcttgagcctgataggaatataccattatttattccctgatgatatcttttttattttaattctcatttagcaaacttctctatttattttcctgaaaatcaaagactgtgaagcatcatccattggcagctgatgcctaatgacattttatttcattttgctgtttcgatagctgatgtatgagggtttgtattaccagtctgcacacagaacggttctaccatctgtttcccaaatggaactaagcataagccaattcctcccttcagttcaggcgctggtagagctgtttttatttttgttttttttaagtggctgattggtgtcctttatccttaagcactaaccttaatcaatgtcttctagttttttgtttttgtttttcctttttccccacctgaaataaaatcttttctttccctaaatactgctcaaatagctgtcatcactaaaaataaatagaccacaattacagttaacccattgcagttgagtcaattctaacttactgtgaccctacaggtcagagtagaactgccctataggtttcccaggagtggctggtggattcaaactggcaaccttttcgttagtagcctgagctcttaaccactgcatcaccaggggctccaattatagatagtgacgtgtagtaaaggagccttgatggaacagtggttcaagtgctcggctgctaaccaaaaggcggttcaaactcactggctgctccatgggagaaagatgtggcaatctgcttctagaaaaatttatagccttggaaactctatggggcagttctactctgtcctataaatcaaaaacaaacaaactcattgctgtctagttgattccaactcatagcaaccctataggacagagaagaactgccccatagggttttcaaggcgtggctggtggattcagacacttaacctctgggccaccagggctctgcgctgtcctgtagggtcactgtaagttggaatcgactcaatggcagtaggtttggttttagtttgggtatgtaataagatcaaattatattgtgattttttttttattagcttttaaagtcccaggaaaatcagagaaaagaaaaatgtacatacaaacagtatgtttcagctaatagacaaaaatgtaggaattttattttattaaaaatagattccattttataatgcactcatcacttaaacaataaattctagcacttcctctggtggcagttaaagatacagttttgcttaaaaagggcactaacttaaagtcacagaattaggaaattaagtaataatgcatgatgataaataatcatttaaaaccacacagagtaaggttcacaagtcatagcaactaagccctcccagtggtcaggagtccacttcgtccctagacccccatctgaagtgcagattatcagggcacttgttattaggtctgcatccaaaactggaagatatctctggaaggaaatgttgaaagatagtggtgtcctgaacgttttcatggcaagaaatcaccctatcgttcagggcctgatagtatccggacctatctatacaatcagagaatatgattttggccctgaagaccttgacttattgaataatgcaagcactatcagaaaacacaaccccaggatatatcagaagctatttttttcagcaacatataaattaagtgtgggcttttccagatctttccttccccctccccaaatctagtcctccattttgcctattgtcactccaggaactgatcagaacattaggctgaaatgttcttttatgactccaattatcagagactcagtttggcaaaacctcaatttctgacagcagaacaaaggaaaatcaaaacaagaagccactcccccaatctcacactgagaactgatggggctctttccaccaaaagctgatcctagtcacatttttatttttaagaaatctcttaacacaagtatttgttgattaagcaaataatgaattaataatgaaattaatcataaactttctcagtattcccttacattcttgacaggctgcaaggctgtaacccatcaactgaaagtgcatggcacacttcttctagtcacctttaccgtgtttgtcaagagctgctgctgtgagctgctaactgctcttcctcctatttcactgtatttgactcccaaatcttcactctgagaaagcacgacattttaaacaaggctaccacagtgattgaacttcatttgaatgacagggaaaacagggctggggttaaaacaggaagagccagtgaagcacctctccttcaccttgaacctcctccctgtgaaatcctggcatgatggggctccacacgtgggatgtgcactcatcctgcaaggccaacggccatgttgacaagtgtacttcccacatccacatcttttaataaaagaaataattacaataaaatcctagctcttgttcagtgactgcctgtcatggattgaattgtgtctcccccaaatatctgtcaacttggctaggccatgattcccaatattgtgtgaactgtccaccactttgtcatctgaggtgattttcctatgtgttataaatcctatctctatgatgggatgagatgggattagtagcagttatgtgaatgaggcaggactcaatctacaagattaggtagtatcttaagccaatgtcttttgatatataaaagagagaagtgagcagagagacatggggaccccataccactaagacagcagctccaggaacagaacacatcttttggacctggggttcctgcacagagaagctcctagtcaagggaaaaactgataacaaggaccttcccctacagctgacagagagagaaagccttcccctggagctgaagcctggaatttggacttctagcctactaaactgtgagacaataagcttctgtttgctgaagccatccactgtggtatttctattatagcagcactagataactaaagacactgcctacataatagggttaaaaaatgtttaagcacgtttcaacttggatgttcagggaaaaaaaaatgatacttttatttcgtgtataagcaaagtagtctttttcttgagcgcccacgtactgatcaacgttagcatttgtcctaagtccgaatttaaatcctagacctagtctgacatgatgatttttaaaacctactaagagacagcccagatgtccactgacaagggaatgtttaaacaactgtggcatgtaatgtaaacaactgagatatgtatatcctgcgttggagtagtattcagcaataaaaagaaactactccagacttcctggagccacggagggcagatgaacccctgaaactattgccctgagataatcttcaagccttaaaccaaaaatatcccctgaagtcttcttaaaaccaaataatattttagcttggctagaaaaaaaaaaaaaaaagtctgccttgagcattatgctcttttaagaactatctctactggatcaaattgacaacagcaactggaaagattagatagaaaccttaaggggcagtgtgagtttctgttaatggggaaggaacaactcagaaaaggagggtgagaatggttacacaactcgaagaatgtcatcaatgttactaaatggtacgtgtagaaactgttgaattgctgtatgttttgctgtgtatactctcaacaacaaaataaattaaaaaaaaaacttctgaggtatgttacaacatgaaagaatctcagaaacattatgctgagtgacacaagccagacaaaaaaagatctcatactgtattgttgaatttatatgaaattctataagaggcaaaattaacctatgctggaagatttaagaacagtgcttgcctctggcggaagggaggttgccccagagggcaacctaaaatttactgagaaggagcatgaaggaacctcctgggatgatggtaatatcctgtatcttgataggggtttcgattgcacaagtatgtgcatttgttgcaattcatttgaatgacacatttaagatttgtgcaaattttatctcaaaagaaaaaaaaaatatgtgtgcacatatttaggagaaaatgttttgagggatggagcctggctgctaaccaaaaggttagtgatttgaacccaccaatgtggcagtctgctttcataaagactacagccttggaaaccctatggggcagttctactctgtccttaagttctacttgccgtaagtcaaaatcagcttgatggcaatgggtttggttttgttgtggtttcttttttttttttggagtgaggggggtgtcttcaacttaacttcaaaatgtataaagagtaaggttgatggatggatagaaggatagatagatggctaaaacaaaaaccaaaccagctgctgtcaagttgattctaattcatggtgactccatgtgtgtcagattagaactgtgctccatagggttttcatggctgtgaccttttggaagcagatctctaggccttctttctgaggtgcctctgggtagattcaaactaccaacctcctggttagtagcctggcacctaactctctgcaccacccaggaagccttagacagatggctatatgtgtagtaaagcaagtacagtaaaatgtgagatgtatagttagtgagtatgagtatgggtgttcgctgcaaaattctttcaacgtttcgatgtgtttagtgttttctatgacaaattgttgacaaaattcatttaggtagatcatttatctctttgataaaaaatacttagcctgtctgtagaaaaggaggagactgcttctctcacaaagagggcttctaggtatatgtgggcctagttgtatggatcatggtctttgtaaagcaaggagaattgcgtgtggtgtcatattatctctggaggaaagccccttgtgcacaggttttttcctggccctgaaggtacggaggctgggacagctcccagttagttcatgcagcttagtcagagactggggacagggcattctgactgaccttcacctaagcttctgctggttatagacccctgaatcctggtcactgcctccacccaggctgctgatcctatagtactccgttagactatgctgtgtggttttcattggctgatttttataagtagatcaccaggcctttcttcctaggccattttaatctggaagcaccgctgaaacctgttcagcatcatagccacacgtaagcctccagtgacagacaggtggtggctatgcatgtggtacaatggccaggaactcagtctgggtttccctcatggaaggtgaggattctaacactgaatcaccagtgtccccagagggcaacctaaaaaaaacaaaaacaaaaacaaacctattgccattgtcgagtccatttctactcatagcagccctaaaggacagattacaaccgccccagagggtttccaaggagcaactgagtggattcgaactgctgaccttttggttaatagcccagctcttaaccactgtgcccctagggctacagagggcacaggaaagcaaaaacctagggcctctttccacaggagcatactgggcctccaagtgtatgaagcctccaagtgtatgaagcctccaagtgtatgaagcctccaagtgtatgaagcctccaagtgtatgaaggctccaagtgtatgaagccatgctctggttagtttcagggcaaaaagaggtacggtcctttcccaggatcctaactgaaagtgggatacaagtgcccctctagcctccatgtaatccaccatctaaagtagcagttcaatctcttgtttctctcataatgtatccttgttggaaaatgatagttctccttatttctcagatatcatgtctgaattcctctcaactccagtctctgggctacatctataaatgatggtgaactgaagcatttttcatacacagtggaagagttgaaaaggcaggagaatgaaggaagcaagataatccttttttaagacaagagcctgctcacaagaccttgtcttgttgcttaatcctgttttccaggagtttaatatttcttcttcattctctgaattcccaagcccaaacagggaaaagttctggtattcagaatgacaaagcaggaaattgggtgtgggttttgaaaaaataaattagcattctgctacaaccactgtatggcagatactgtctgatttcatccttataagtacacacattgggcattagtatatacccatttcaatttttacttttttatgtatgtgttcatttatttgggtttcttttttttaaaatgcagaaattgaggggcggggccaagatggtagagtagtcagatgcttccagtgatccctcttacagcaaagacccgaaaaaacaagtgaaacaattatatttatgacaagctaggagccctgaacatcaaaggcaaagttagaaaatcgactgagtggcaggggaagcagagatggttcagaagcggagaggagttaccggacctgaactgctgggagccctcaggcaccattcccaggagcgactgtggagggctgatagtggcattcgggctgcagtttcctcagggagaaacagccatccacacaggctactcacatctccggacctagggaagggcggtgctcttggcaaaagctaagtacttgcgtatattttacctcgccccttgcctccaacctggcttcagtgcctgttgattttcctgggcctgagataggttctgttgagtgctctgagccattctcctggccttggagaaggaataaattgggaaaaagataatcttccagctccactaacctgggagctcaggacagaagaagctcctgtccaggtataatcagtccatggactttggttgcctttcccccctgcatggacctatgtgggcctatttcaggagaacagacccttgttggcaaactgcaactgcttcagatgtgtggtggagaggtgggtgtttgatgtttgacactgttttggctattaaacagggtcctcacctacccacatcaggggcctaaggactggtggctccattcaggtcacccagccacctgtgacaggggtccaaggataactggtacctcccagtccttacaaccaaaaacactgggcgcccaaggtctatctgcagaaccctcccacctgtgtgctctagggaacagggaagtgctttcctcacagacactcggaggacagttttcagccccctgccttgttcagagagtgactccctgctgcaacaagataccggtacctacagcaatcaccgctgcccctctaagactgtaggacagagcctacatacttgacacatacttgatgaccaactatctggacaactgagttgaatccatacaagaaaagtgaatagactcctaggctcatatacctgataacagcttgagctgtctggtgacaggatgttagagcttcaaaggcaaaaataagcaagctagcccactcaagcaacctatttggacatatcaaaacaaaaagaaagcaagaagctaggatacggtaagcaaacataaaataaactaatacaataacttatacatggctcaaagacaacagttaatatcaaatcacataaagaagtagaccatgatcgcttaaataagctctcaaaacaaagaatcaagggatcttctggatgaagacaccttcctggaattaccggatgcagaatacaaaaagattaatatacagaactcttcaagacatcaggaaggagattatgaaggaggtcaggcaatacgcagaacaagccaaggaacacacagataaagcagttgaagaaattaaaaaggttattcaagaacgtaatgaaaaatttaataagctctaggaatccacagagagacagcaaccagaaattcagatgattaacaataaaattatagaattagacaactcagtagaaagtcagaggagcagaattgagcagctggaaggtagaattggtgagattgaagataaagcacttggcaccaatatatttgaagaaaatcaggtaaaagaattttaaaaaatgaacaaatcacgtgagactctatcaagagaaataacctacgagtgattggagtaccggaacagggagggataacagacaatacagagagaactgttgaagatttgttggcagaaaacttccttgatatcgtgaaagatgagaagatatctacccaagatgctcatcaaactccatataagaaaaaggtagatcttaaaagaaagtcaccaagacatattataatcaaacttgccaaaaccaaaggtaaagagagaattttgagggctgctttatttttttttatttttttaaggataaaagaaaagtcacctacaaaggagaatcaataagaataagcttggaccacttggcagaaactatgcaggcaagaaggcaatgggatgacttatataaagcattgaaggaaaaaaaattgccaaccaagaatcatatatccagcaaaactgttgctcaaatacaaactcaaagttaggacatttccagatacacaaatgcagaaattgtgattccatgagggtcatttgcccaataaatggtggagctggtactgaaaccaatgtttgactccaaagcttgtattctttttctactgcgccacatcagcaatcaagcagttaagtcttgccgaagtttccttgggtgtgtgtcaacatttttggccatattgttgtcacatcgacagcctcatcaatgtgtttctgctatttgcatatgctgtacttgcattggtgttgtgagctgccattgagttggtccccaactcatggcaatcccatgtacaacagaatgaagaactgccctgtcctatgtcatccctgtgatctgttgcggatagaccattatgatatgtagggttttcattggctgattttcagaagtagatctccaggcccttctttttgctccatcttagtctggaagctccactgaaatctgttcaacatcatagcaacatacaagcctccactgacagatgggtggactacactgggcatgaagtgcactggatgataattgaacctgagtctcctgcatgaaaggtgagaattctttttctctcaattagattaagatgcttctagactcaggttcatgcacaatgatacattttagcatctgttattttcaaagaagtgttattgtaacctgagacccaaataaatacctgttcataatataacccagtctcaaaggaacctgggcatttaatactaaccagctactcagggaaacatgcatcttgcccttacggcattctccattgcacacaaatgccacagaaaacatacagccaagcactgacatcttctttccctaggggagaagcccttcctttgtgctttcttaagatcctgtgctctcctctgtcactgtaccttattaatgatttctgagttccttgaggtcagttactctgccttgatttttatttcatttccagcgactaagcacagctgctgttactaggtaggcattccataagttcttcttgagcgaattaatgtattaattttttacactcattcatttcctggcaccttgtattttcactaccctaaagacctctacgtagaggtgccttatcagagagaagtcatgacatgtgagaggtgccggcaagactggaggggctaagccttcacctatgacacttggagcttttaagatgtagaactattagtaaaaccacaaaacatctcccagaaatattcccctggttttctcatcaccaccacccacccatctgccagtatgccacactgtgaatgttgcaatgatgctagaagcaacgccactggtatttcaaatataactagggtcacccatgatggacaggtttcagcagatcttctagactaagatggactagaaagaaagaagtggagatctactgaaaattagccagtgaaaagccctatggatcacaacagaatattgtctggtattatgctggaagatgagccctctaggttggaaggcactcaaaatacacagagaccacaacaatggactcgagcataccaatgatcatgaagatggctcaggaccaggtaacattttgttctgttgtatgtgaggtcaccacggctggagggcagctaacaaaatcaagttcttgtcatgttacaagtccatgtatttcatctgtgactaattaactcagctggctaacatcaccatgatgacaggagacttctgcattcaatctttagcctgcaccctaccactgccagctttctggccaactaaatcctgccaagatggcacagtgccctagtgcctgggggagagaagatttgagaattttctaaatgaagaacatattttgcattgcctacaatatcatatgtttttacatttcttattctacttccattgtcttcctcaacagcccaattcaatctccctcattttaattgcagtgcaaatcttccctcaagttcgggagcgaaaagctgactaattttctattctaagaggaaactgtccatctggaaactttgcttgtttagaacttggttccgcccaaccgcaccaacttgtttccttagtaaaatgagttgcttctcttaggagctggcacatataagtagcaggcagggacaatccccaggtcacctatgattttgatgatcttcacctgatctctgcttaccctgctgcaattgatagcaatagtaaatctacagccaagataactgaaaagtgctctgaaaatgaaagtcactctcgataaatgttggagggctggcattccttatttctttctgaaatgatatatatttttaattcagcacaaatttcccaagaatactgttgcccagaaacctacagtcctttaattcactcacggggatgcaataccatttataaacagatcagaaggtgctagtccagtatgaattgctgcaggatattcactccagggccatctgtatgggcagaaagtggcataaattttctcacagacaggcttgtgcggatcctgcatgggtgctcactgtgtggagaggcagactggagagggcagtgatgtgaattcagaggataattcccagtgccaacatgtagctggagtttcctgaatgttaacaagcaaatctcaagtgtttttgctcaacagtggcagaatacaaaattgcatttgtgggttcatgtgtttgtagagttcgcattaactcaaagagagagaagagaattccatgcacacaagtgaatgcagaaaggggaagcacatctcatcagcgttcactggcctggttaacaccctgaaggcgtgggtttgtaccacagcctgaaaatccacaagaggtctataaaatgggctatttttcccaaactgagccaggactaattcccggtttgtttatttatttatttattttaattaacagttaaaatcacctcccatttccagtctcatgaactcatctttctaacctataaacccacctttgtaatgtgttctaacagaattcttcaagataataatagtttacaaataaactcagcttttcagtttttttttttttttttaatttccttgaaaagtctgaagcacaaacgttctttgactttgagactgctccaaaaggaccctgagttgccaagatggctacttttgatatcagtgtattattttagagggtggatctttatagctctgtatttaaaggtcatggcgaggggtggatttgaagataacagactactcaatttattactggcctgcaatatttattctcattggctgctgttgataggaatgataaaaatattttaatgtatcacgaggatacatatgcattttaattagaggttgttctgttccagaaagtaatgtaacaacctagaacctcattttttctgttttttaaaatgaatattttatgattttaaccttggttaaaaaaaaaaaacaaaaaactcaccaccgtggagtcaatttctattcatggtgactctacaggacagagtagaactgccccaaagagtttccaaggagcgcccggtggattcgaattgctcacctttatgtttagcagacgtagctcttaaccactacgccaccagagtttccaaccttggtaaaggaaaaatagcctgtggactggacaaccaagacttctaatattgagcactgtgtttttaaaactttgaataaagacaagtaattatattaggtactcaaaacagggttcacttaatatttcagataagtcacgtatttcaccacagttgcacctggttccttatcagatggcgaaaggttcctagcatatgcccaacagaccccattctgttgtcattcctaaagccccatttgaaaatctgacccagagaacattaagaattcaatcaaatcattagacttgattctcagtggcaacctcaccttgaatttgatcacatcttaaggcaatgtttttgtgccttgacaagtgtttaatcttagcatggagttctcaggctgaatctgaataatgtcagaagcagcagagcaagcagctgatgagaacctgttgttcaccatttggtcaggtttacgaagggagtaggaaaatcaaattggccacgtttgggatcaaattgtagataaaatgtaatagcagcagagaggtactttaaaaatatacaaaactagcctctgaagccttacagatgccagcagggccagcttcttaacgcaggtacatcttgtggcatttgctgtataatatttcagacttgtttctactagggaagcagatgttggaaaccacagcacatccagatggtgttacaaaatcctctcccagtctcaactcttgtggccaagatacagtccggataatctcagtcctctgtactccctggagccacacaggtgggtctacgtggagatattcttaccagctgtgtactgttgttagttagctgccatccagttaattccaactcatggcgaccccagtgtgtgcaagcagagctgtactccataggtctttcaaggttgtgatttttcagaagcagattgccaggactgtcttctcaagagcctctgggttggttcgcactgccaaccttttgattaatagtagagtgcttaaccctttgtggtaccacggaccctaccagttatagaaaccttacagtctctgagccttgatttccttacatataacatgggtaaattatgccagtcctatttacctcagagagatattataaaaatccagtggggaaaactgtaaaatgctatactagatggtacttgtctttattgtaactttaaagagttttttccagaagccaaggccctttgaactgtagatctttgggtggtgatatgagaggggcaggaacaggcccttaagagcaccagccagtcaaactaacactgcataaagcactccttttgccttttttcagacagtgcaagagataaagttctctcttcaggtttcagacagcaataggtttgtaggataacctactgtattactcaggacaggctaggttacgctggaataacaacccaacatttcagtgacttaaaaaagggtgaatttctgttgaggcaagtctgggaaatcacaggcctgggcaacaaagccatcagctgtctaacatgggcagggtaaccccacgtcctggtttcccaggaaagttcactttacgtctgctgtcctggcataattattaatagtacccttggaagttcaaaaattgtcctggtttttaaaataaatattatggttttcagccaatggagtaattcaagcatgcaggctgcccagccttctcaacatgaagcctttaccatggctgggaaaagagaaacaagagtgttgtagggggttttcactgtctcattccagaactgtcatttctgtttataggccattggtcagaactaggcacgtgcccccctacccccaactgctagggagctggtaaatttagtcttctaagtacccagcaaagagaagcaagccacgtattggttccaatataatgtcctccatatctgcatggtcagaattgaaaccttctcagtgattgcctgcccagcctcgtagactatacacagccatctgtgggtggctgagtgccaaaattcaagtatactaaagatggtgcagaaaccccagtgatgtagtagttaaaagccacagctgctaccaaaagatctgcagtttgaatctaccaggtgctccctagaaaccctatggggcaattctactctgtcctgtagggtcactatgagtcggaattgacttgacagcagtgggtttttaaagatggtgcagggtgcctgggtggtgcaaacagttaacacactcagctgccaaacgaaaggttggaagttcaagtctatacagaggcaccttggaaaaaaaagcctggtgatttacttctgaaaaatctgccactgagaaccatatggggcacagctctactctgacacacatggggttgccatgagtcagaatcaacttgacagcaactggtctggttttggcgttcacgggtggtataaacagttaacacgctctgttgctaactgaaagacaagaggtccaagttacccagaggtgcctcagaagagaggcctggtgatctacttctgaaaaaccagtcattgaaaatgctatggagcacagttacactctgacatacatggggtcaccgtgagtccgaaccgacttgatggcaactgttttttgttgaatactggtcccactggcctctctccatagggtgttgcttactaccctctgccatatgactgagctgtcaccattgagactgtgtgtcacccttcgtgcactcatgccgaattgatttcaatcctacgcaattagtctccttgggctctctaaattgttcatcaatgtgttccctctgatgagaatcttcaaacaccttcaatgtccagtttgctttgaagaactcactattggcacttcagcgtgacagttgatagacatgtttttgatgcagcctattttatagtaaatacctatgaacatggagaagcaacctgtacttccataaaactttataattgtccaagttttattggcaaggaaaacggaagcagtagcttctcagtggcggtggtggagatgctcaacgtttcactattctttacccaatattcaccgctgaaaatatcatcactattcaaattaaggcaataactggtatgcttgggcctttgaaactttgaagtgtgaacacttatcaagatttaactggtaaaagtgaaaacaaggaaaaaaggagtcaacttaatacctgcttccatgttagggaaaaaaaaaatcatcagggcaatatgctttacattgggtagccacgagtatgtttttcaccattataatcatttggcatttggatagagatttttctaccaacctccataataaaaagaggatgtttttccttccctccttacctattcaaatgttatgcatccttcacccccccaccccaaaccccatttcctgcttccctggaatacttacacacaatcatcttgggctcaaatgaaaagttcaggttcccaggcccacctgagacctagggaatcagaatgtctggagggtggaggccaggaatgtgctttttactgtatttttttttataagcatactggtacacactaaccagtgagaatctctgtgcttttctacctgcctcctaaagcacttactcatatactgcccagcactattaaatattttcaacgcaatgtcacgtactggtttcttaatcatacattcacaagcttcttaggggcctcagtctgtatctgcctggagcatcagtttatcctgagtgaatgtaattgccctaagttgggggatatatattgatttacgtcatttaggggcatacctgatgctgaaaagacagcaaaaaatcatattcaggtgactctactttgaattgcaataaaaaaaaacttaaaaatcacaccttctgtaatcgaataattatttcctcatttatccactcactcatttatttactcattcatttatctattctttcacttgatcaccaattattgaatgcctacatcaggagcataaaggattgtccacattcctgagggataagaatcagtatcagcacaaagctgatccctgtaaggcagaggtcatgtgtatcttcggttcctcccttctccattacttctatcaccagcggctccccccatggcactctctactttctgcagggtttaataattcattgcacaaagaactcaagaaccatactcatacggtttactggggaagtaacaggctacaacttagggccaggatcaacttggaagtaacagaacaacttggaatcagtatcaggaaccacacagtcctcaagtgatcagcaggcatggcttctctgctgggtggctgccttctctgccaggcaggtgccccaacttagcctgtttgcagcgcaggcctccctgctgcgcaggctcagctgctaactggctggactcatagccagggaagcagctccaggacgtctcgactccctttgggctctgcttctctgccagcccatccatttgctagcatctctcttctctctcctccaggaagtctctccacacctctgtgtttcaaccatttctatatcctgagcttggtcagttacaaggcggggcctcctcaccagagcagagttcaaccaatcctcaattacccatgagatgtcagtcaactcaggtcttcttaattgctagacaagttgttaacaccttactcaggaaatgtccatcaacctggggaacccccctgggcaaaagtgacaaatcctctggggcagaaaactacctggaagcccccctcccccccaaaaggtgcttctccaaagaactagggcaaaggtaactcctcagaacttagggggaaaatcttccaagctgttttttcaaagaaccaaggcaaaaggctacataaaggaactcatctcaccactatctactatgtgcaatgagctgtcgccaggaagttgaggaaggaagattgccaagcgtaggagccaggaagaccaacaactaccctgccctgtaacaggtgtcagaagaggatgccacatgggtgaagagatccaaacagtctgaggtggggctctctgaaggtactgacgtgctgaatttttgaaaaatgagtagggtttagcttgatggaaaagggatttttcaaacaaaactaaggatcttatgtacaaatttcaaattgctaattatgggtttcttaatgagaaataatgagaaatgctttcagtgtgtgcatacgagcctgtatgtctatggaaagagtgctccattgtagttttgtgcagagggtagcattctaaccagatgcaaacaattttaagtcactattaaccaaaccagttaagattcttccaactgaattacacactgaaaaaatgtactgtttcatagaagtttatgactacatcccaagaaacgtcaactggggtttctacgcaatgcttccccgaggtttttgtgtaatgctctcccagtggacacgtatgcatatttggagtatctgtctcattatgctccatgtacaaatgtatttattcccaatacttttgaacgtgcaagttgcctctatcatttagaacatgcccttcttgaccgtggctgtctgagacaataaagaataatcacatcagaatctcctcaatatctgttcctaagaaagaattgctatgatgaaacactagtaccaataactgcaaaaaatttctaccacatggttggcattaagtaagggtcgattgtcttcaagtatttcttactgctgaatacaagcatttatatagcacttttattgcacatggttatacaatgaaatagatgtgtaactttaggccgaaaaagtgcccatttattctcgaattgtcaatggtacaaaaaagaaagaagcaagaatacttggaaataaaagagcagagaacctatatactgaaattaaccttgaaaaacagattttctttgatattcgaaagcaccagagaaagaagcacaattcttagattatattgtaaaagaaaaaacatgagaaacaaagcactgataaagggcagtggcagttacatggcagaattctcaccttccgtattggaagcccaggttccattcctggccaatgcacctcaagtgcaaccatcatccttccatcaatggaggcttgcatgttgctatgatgctgaaaaggattcagcagaacttccagactaaggcggactaggaagaaaggcctggcaatctacttccaaaaatcagccaatgaaaaccctatggatcacaacagtctgatccacaactgttcatgacaatggcataggactgggcagctctttgttctcttatgcatgagatcaccctgaattagggcccaacttgatggcagctaatagcaataagaatccgccaagtgttaggatttttttttttaatataaatgattagtgataatatattcttttgattaaaccactagaaaataccttaatactggtgctacagctgctaactaaagggtcggcagttcaaatccaccaggtgctccttggtaactctatggggcagttctactctggcctatagggtcactatgagtcggaatcaacttgatggcattgggttttgggtttttactatgcagaggtaaacataagattattttttatctttaaacagtcctaccatgggatattcagatctttttgtctctacatatgcgagcatgagaaactgtgcagacctctgctttccttccatccatgtggttttattgtaattttggtaatgaccgtagtacccatattaaacgaatgtcaaaaatcacgtaacaagcagcacatctgactttcgtccagtcacccttgcctccccaaacaaaggagtgtgctggtggaagagcagattaaattgtaaagtgcagactcttcctccagactgggaaggagagggaatgggcctattctgcagtaccagttagaacatgggtccccaaggacccaattatctgtatcttgttaggctataataggggctataaaatgatattgcagtatttctacaaccaagagattgattagtgaagttgggtaaatcaaatgtcagtgttctcttaatgggtgaatatggacagcatccaaagcctgcgattgtgaggtgtaattatcacatagcagttaatacgtgtagctatcggaggcaggaagctcatcaatgcagaatagagaatctgtattcacattaactggcagtgtttacggtgctcctcaatcccagattctcaattcgtacacgttagatgattatcactctgtggaatattttgctgttgtttgagatcacagatttaatatgttcattatcatcttaacagcaatgccatttagatatagagaacctgagcctttgctactaaagctcctatcagaccccttgattttaccctctcctctctcttctgtaaattccccatcatcctactctgtttgtacagctctctctctctccactacctcttttgttgttcttaagtgccgtccagtaggttccaactcaaaggaaccctgtgtacaacagaaggaaaccctgccccgtcatgcaccaccctcaattgttatgcgacagtccactgttgcagccactgttgtcaacccatctcatagaaggtctttctctttttctccggccctcttctttaccaagcatgatgtccttctccagggactggttcctccggataacatgtccaaagtatgtgagatgatgtctcgccatccttgctcctaaggagcattccagctgtacttcttccagggtagatttgttcgttcttctggcagcccatggtatattcagtattcttcaccaacaccataacttaaaggaatcaattctttttcagtcttccttatcattgtccagcttttgcatgcctacgaggtgatggaaaatgccatgatttgggtcaggtgcgccttagtcttccaagtaacatcttcgctttttaacactttaaagaggtcttctgcagcagatttgtgccatgcaatatgtcatttgatttcttgactgctgctttcatggttgctgactgtagatccaagcaaaatgaaatccttgacaacgtcaatattttctccatttatcatgatgttgcttattggtccagttgtgtttttgttttctttatgttgaggtataatccctactgatcattccaaatcctcttctgaagctggcttgaatttctggcagttactgtccaataatttccacattcagttggatcaccttgctttggagtggaacaaatatggctctcctccagttaactggccaggcggcgtcttacaaatttcttggcatagatgagtgagtgcttccagcattgcatccatttactgaaacatctcaattggtattctgttaattcctagagcctatttaccgccaaagccttcagtgcaccttggacctcttcctccaatactatcaggtcttgtcatatgctacctcctgaaatgattgaacattgaccaattctttttggcacaatgactctgtatattccttccattttcttttgatgctttctccatcattcaatattttgcccatagaatccgtcagtattgcaatttgaggcttgaattttttgtcagctctttcagtttcagaaatgccaagcgtgttcttcccttttggttttctaactccaagtctttgcacatttcattatgataggaaaccacatgatggcctgattcaaaatggccaataccagtccatttcagttcactaatgcctagaatatcgatctttatgtgtttcctttcatttttgaagacttccaattttcttagattcattctttgtatatcccacatttcaattattaatggatatttacagctgtttcttctcattttaactcgtccacatgagcaaatgaaggtcctgaaagctttactctatccacatcattaaggtcaactctactttgaggaagcagctcttccccagtcgtagtttgagtgccttccaacctgagaggttcatcttcgggcactatatcagacaatgttccactgctatccatgaggttttcactggccgatttttttaagaagaaaatcgctaggtcctcctacctagtctgtcttagtctgaaagctgtgctgaaacctggccacatgggtggccctgctggtatttgaaatacggtggcataacttccagcattacagcgacacgaaagctaccacagtatgacaaacttacaaaagagtgtcggcccaatgcctgacctatgtattttaggacacaagactgacagtctctccagcctgtcacctgacctatagattttggacttgacaacctcccacaatcacgtgagccaattccttaaaaatcaatttttccctcccactcactctctgtcactgtttgtttctctacagaacactatctaaggcaaccctttcagggcctcaaatttagcacatccagtcaccggtaaccacatgcccccttgactctctaccttctcctgtctaccctaatgggtctgatattgtctgtagacccttggtagcatttctatcccctcttatgctttccctggtggctcaggagctgaaactccatttccagctttcgggtcctactaatgagctgtactcacaatttgaaggttgaggacagacatgtttttcttcccctggcaatcgtggtggagaccgtgtgggctcagtgatggcaggtttttttacagttggctgggatgactcttctgcctgttaccattttcctcctcatgtaccatctgcgcagtaaaccacggctactcagaatttgttcttgcaacacactcctttcttttctccttcgaggcctactttgcattatttttccacacaaaatgtgactttccttaacccccagtgaagttctccaaatcctttaagacccaactcaaatgtcaccgcaaatccccatattccaatgtattcccacagtgttttgaacctaacctttactgctcatcatattctttctgttctgtatctcaacaggtgtactgtctccttgttgtaaaacataggtgccacatgacttttagttgaactgtactctctatggagctctggtggcacagtggttaagagctcaatctgccaatcaaaagaacagcagtttgaatccaccagccgttccttggaaaacctactgggacagctctactctgttctttagggtcactatgagtcagaattgactcaataacaatgggtttggttttggggttttggtattctctatgctagacttaactctttggtttggtaagttgtgaaaaccaggacacagtgaactgagttcacttaccatgtctgagatccaaatgagaacctgttcttactgagagctgggtgttaaggtcttatcacaatttaaaacttacctatttgatatgtaataataaactccagtggactgccccgatcactttgccaaactgtagttttatagagactattacttgacattagtgggtactgatattacaaatgttctaatatataattttaacatgtcaagactttttgatttataagcaagatctaagattctgcatgagtcaagctttcaggaccttcatttggtgatgtggcatgactcaaagtgagaagaaacagctgcaaacatccaataaaaatcagaacctggaatgtatgaagtgtgaatctaggaaaattgggaaccatcaaaaatgaaatggaaggcataaagattgatatcctaaccattagtgagctgaaatggactggtatttatcattttgaactggacaatcatatggtctaatagctatgccaggaatgacaacttgaagaggaatggtgttgcattcattgccaaaaagaacatttcaagagctatcctgaagtacaatgctgttagtgataggataatgtgttagtaaaaaaaaaaaaaaaaattttttttttttttttatcgataggataatatccatatatgtacaaggaagaccagttaatatgactattactcaaatttaggaatcaaaaactaaggccaaagatgaaaaaactgaagatttttaccaacttctgcagtctgaaattgatcaaacatgcaatcaggatgcactgattattactggtgattgaaatatgaatgttggaaacaaagaaggatctgtagttggaaaatatggtcttggtgatagaaacgatgccagagatcacatgatagaattttgcaagaccaatgacttcttcactgcaaatactttttttcaccaacatcaatagtgactatacacgtggacattgccagatggaatgcacaggaatcaaatcgattacatctgtggaaagagatgatggaaaaatttcaatatcatcagtcagaagaaggccaggggctgactatggatcagaccatcaattactcatatacaagttcaagttgaaactgaagaaaattagaacaagtccatgagagccaacatacaaccttgggtatatcccacctgaatttagggaccatctcaaggacagatttgacacgttggaacactagcgaccaaagaccagacaagttgtggaatgacatcaaggacagtatacacgaagaaaacaagaggtcattaaaaagacaggagagaaagaaaacaccaagatggatgtcagaagactgaaacttgctcttgtatgtcgagtagctaaagcaaaaggaagaaatgatgaagtaaaagagctgaacagaagatttcaaagggcaactcaaaaagtcagagtaaagattataatgacacgtgcaaagacctggagttagaaaaccaaaagggaagaacacgcacagcatttctcaaactgaaagaactgaagaaaaaatttaagccttgagttgtaatactgaagaattctacagggaaaatattaaacgatccaggaagcatcaaaaaaaaaaaaaaaaagatggaaggaacacatggagtcactacaccaaaagaaatggtccaaccatttcaggaggtaacatgtgaccaggaaccgatggtactgaaggaagaagtccaagctgcactgaaggcactggtgaaaaacaaggttctgggaattaacagaataccagttgagacgtttcaacaaacggatgcagagctgtaagtgctcactggtctatgccaagaactttggaagacagctacctggccaaccaactggaagagatctgtatttgtactcattcccaagaaaagttatccaactgaagagggaaatcatcagacaatatcattaatatcatatgcaagcaaaattttgctgatgattattcaaaagggactgcagcagtatattgacagggaactaccagaaatacaagctggatttaaaacaggatgtagaaccagggtatcactgctgatgtcagatggatccgggctgaaagcagagaaaccagaaagatgttgacctgtgttttattggctatgctaaggcattcgactatgtggattataacaagttatggataacattgcagagaatgggaatcctggaacacttaattgtgctcatgaggaatctgtacatggatcaagaggcagttgtttgaaaagaacaaggggatactgcatggtttaaagttaggaaaggtgtacgtcagggttgtatcctttcaccatacctattcaatcagtatgctgagcaaataatctgagaagctggactatatgaagaagaacagggcaccaggattggaggaagactcattaacaacctgtattacgcagatgacaccaccttttcttgctgaaagtgaagagggcttgaagcacatagtgatgaagatcaaagaccacagccttcggtatggattacaattcaacgtaacaaaaacaaaaatcctcacaactgtgtcaggaaacaacatcatgataaatggagaaaagacttaagttgtcaaggatttcattttacttggatccacaatcaatacccatggaggcagcagtcaagaaatcaaaagatgcattgcattgggcaaacctgctgcaaaagacctctttaaagtgttgaaaagcaaagatgtcaccttgaggactaaggtaagcctgaacaaagccatggtgttttcaattggctcatatgcatgcaaaaggtggacgatgaataaggaagactgaagaataatcaaagcctttgaattgtggtgttggagaagactattgcatatcgaatataccatggactgccaaaagaacaaacaaatctgtcttgaagtatagccagaatgctccttagaagcaagaatggcgagactacgtctcacgtactctgaacatgttatcaggatgatcagtccctgaagaaggacatcatgcttggtaaagtagagggtcagtgaaaaagaggaagaccctcaaggagatggattgacacagtggctacaacaatgggctctagcatagcaacaattgtgaggatagtgcaggactggacagtgcttcgttctatcgtgcatagggtcgctatgagtcagaaccaattcaatggcacctagctacaagaccctatatatgaaggtgaactacatgaaatggctgatatttgtcaattttgacttacaaagatgacaattttatatggctcaatctaataaatacaataaaagaggtttttcttttaaattacattgctatttttcacgacaggttttgctttatataacacggcacaatgaacaaataagcttgagaacagataagcctcatggtaaatggctttaataatgataacaataatgatagctaatatttattgagtacttactatatactagacaccatggtaagaatgttacataaattttctttttttttgtttcttataacaccacaattttaattatcatttgacagatgaagaaacaggctttaagtggttaagtaacttgcccaaggtcccgttgctagtaggtaaaaaaaagtttaagtaagaagtcttatgctagaacttctttttcttctggggactttctcgttcctcattccttggtccctcctagtgagaccaggaagaaggatgaagaatgatgccaaatagaaatcaaggtagagcacaaacgccaccttcacaaagacttccttgatcactgggacttcaatttctctgtttattgtgtttctctacatccctttctaatttttttttcctcacgtagcacttgcaaatacaattcatcctcattattaatggattccgtatttgcaaattagcccagtcacaaaaaatgtatttgtaaccccaaaatcaatagcctttagcttccgtggtcattcacagagatgtgcagagtggtgaaaaatttctctcgcccagtgttcacattcccagttgaggctgaacaaggcaacactctctcttcttgtatcagctctcatactataaacaagtggcctttttggggtctttgttttttttgccacatttttcacattttcgtacctttttcttggtgattttatcatttaaaataaccccaagtgtagtgctaaagtgctgtctagtgttcccaagagcaagaaggctattggttatgtgttcagtgttagtgaaccaatgatatgtattgaaataggtatctaaacagaaaaaaaaaaaaactaaacagaagcacacagaaaacaagcttatgtagtgactgttaatgtgaatgtgaccagaggcctgcaagaacctaactctgtatcttctacagggacaagggttcagtgttcactaattaagtgttcatgatgagtttggaggacataactaccatgagtaacaacaatcaaccttatttcttcctctcatagctcagtagacatgtctaaatttcccagttatattgtaagcctccaccagagtagtgagcatgcttaatgtacttcatttcccactgtatttccatctaaacataatctatccatccatccactaagtattgggtcttaccactgggctgaatgcaaagagcattgatataaaagacccagactctactcacaaggaacttactactgcttcatggggacatgaacaagtgtgtcaacataaaccaagccacgcattaaggagcatgagagaggtgagtccaagtgtgctgagagcagagaggggctcacctggcagtgggaagggaggtacttcacagagaaggtttcccagaggatttggttaaggtgaaaccttggaaggccaatggaaaaaattcagaaaagaatttccagtaagagagaacagcacaaaaaggcctgagatgcttgggtctctatgagggttttggtttggctcattgacaggaaccaacaaggaactgggggagagagaggcagggtaagaaaagggaataggaaggagaaaaagggaaaaagaaggagagtaggatctagtcttaaatttaggaaaatccaggtgaaagtaaaaccagtggccacatgcctaccaataaaatcagataaactcagagctgctgcccagggacagtatccatgccaatgatgcctgggcccaggctcacacataaaagagcttgtgcgtcgggggtaaaggagtccctatcacataaagtctgatactttataatagattttgggaagttggaaagacagtcatgtgggcacaaagagctgatgaaaataaaaaaggctgtttctacctgctttggtggtaggcgctcgttagctgaacagatggcatgtttcagcaaagtctgatggaaacaaatctttgcaggtctcctacattaagaagtaatttagcagccttcctaagaggtttggaatgttctttgtctacatataaaataccaagaaactggtcttttagaatccttaactaaagagtatcaatgctatcaaccaaaatgaatcataataaaacaagacgaggttttccaagtctgggcacgttactaaaagccttcagtgtaaggaaggattttattatatttcttttacaaagtcggcatctgaaaggttcaggaaaggacagctgagtctggccaatagaacagtgctaatggccacagtcaaggcagtcagcttctcagagaagtcagcttgcctgtctaggaaaacgtattttgacagagaagtaggcgacgtggcaatgcaatatttatggatttcaactaaaatgaaaacaccttttaatatgtaattgaaagatataacaaatttatgatgccttctacatctcctaaatttgcatcaaatcacggcaagggtgaggaaactaccccattattaactagctgataggcagcgtgaaacgtgttcaacatttatattctttctacgccaatcttctgtttttatttatatgatcattttttgacacacgtaacgtgaacaatgtctgcagaatgtttattaacgaagtgctaagacaattctgctatgcccatataaaaccacctgctaatgactcatgtcaaaacctgttcatgttcttttctttttccttcctacgttttctgaaggcaaccatttcccattaaactcacctggctaccttggaggcatttctggcttcttctggcatttcacatttgttgggaaacccctgggcttgcagattccattagggaaattcctaaacctcagcagggtcagggtttagaaatgcaatatacctttccattcctaatgcagatccagggggctatgcacacagacggtatttcattttgcaattaagttcaggtgaattatttgaacttcaaaaggtgaaatgtgccacatttaccattattcaaaaacatcgtaattctcctctatttttgaacggaaacgtaactcagggtgctaaatcaggaatgaacaaaggatggtactgcattcttgcctgtagcttctaaaaggaaaccttttctaacatgttaaatcctcctcatttaactagactgtagacttattcctctgacaaaccctcatgtctcaggacttttttgtaaggcaagtccttccctccttttccctcccacatgggagcactgaaaaaacatctgcgcggacttaaatggaggtcccggaatgcagccttataatcgagatcactgttcacagtggctaatgcttctcacctgctacttaatttcttggggtcaaataagaaggtgaaaaaatgaaagagatgaagatcaagactcttaacggagggcaagcccaggcaaggtggagaatcttttccaacttttcgaagacctggaattcaagtaagttcacacttccccaagaagcgccccttgacctctccaggtcgctgatttttcatcctagcagttcctcagtatttgtggtctgtaacactcattttagcactcatatcttgtcttgctctctacaaatgtcccatgtgtacaccctgcctatatcccaactaaaaagggatgacagtcatccaactcttcatcccacccatcacctgggatagcacagtggtcctgctcagtgagtgccaatgagtcaggttgtgctatttgggaagccacagaaaagaggcttggcatctggtgagcacactgccccattttggttttgctttgttttaaagtcaaggctcatcagaatatttgcatacggactgttaggaggttgccctccccagggactatggataatttgcacaatcatcacaacagtgggatgactggaaaggggccaggactaccatttctggttcaggacagcctgggttcaagttcctgcctcttccgtttctacttaacatttactcttcagatttaggagtccctgggtagtgcaaacggttcaagtgctgggcagctaaccaaaaggttggaggttggagtccacccagagatgcctcggaagaagtgcctggtgatctacttctgagaaattagctactgaaaatgccatggagcacagttctactttaacatacatggggtggccatgagtcagagttgaccccacagcaacaagtcagatttaatctctctgtacctcagtgccctcacctctaaaacatggcaagtctatttaatcacatcttcatgtaagagtgaagacaacatgagtttaaaggatttaaagcacttagaacagtacatagcaagttctcctgttgctttaaatgctcaataaatgttaggattggtatcatttgcccaggagtccagatcgattagcaagggcccctaaaagacaggcccaaggtttgcttccagtttgttttttgtgggtattcagaggcaggaggaatacaaatcctcggctacattagttccaagaaaattttctcttgaaaagaaaccagtgttacacaaagccccagagcaagcctcaaggtatgatgagggttggggaggtgtgtgcacagcgtgagtgccgcaaggcttccagccttgttcagatttgaaactcaaccatcagtgcttcacttctttagctttaaattgttgcctactcaaatgcatagactcttggaaggaaaatatattaatgaaggaaacagttctggccacaggaatgagacaaactcgaggtggaatcctgtttcttctacttttctacctatagtctgagttgtggaatttactcttcttccttaaacctctgttttaacaaccatgcgatggagatgccttactgagttgctatgtggaagggagatgacataaggaaactacatggagttcctggggcacaggaggcatgtgatatgttgcagagtccctgggtggtacaaatggttaagtgctggatgatgaattcggagaagctggcagttcaaatacactcagaagtaaagcctggagatctgcttctaaaagatcacaaccttgaaaaccctgtagagcaaagttctcctctgacacatggggtctccatgaaatggaattgacttcatgacaactaaaaacagcagcagctcctatttactattatcatttcagctccaagtgtggggagtttatcaggattttctgaagcaaggtgaattgctaggacattctgataggcaagttggggaggaaatgaggaaggcacaggttacttgttgtggcaagagaaggcacaggttacttgttgtggcaagagaaggatactaaaaggatgattaaaacggagataaccttcacctgctttgaattcctggctcggactcgtctaggactttgtctctctttacacattgttttacactttttattaaagtttcttaattaagttctgggtaatagtctttggccctgagctctgaacattctttgaatttgagtcccaagaaaagggtgatgacaccacacacatttagcagtgggcattcagattgtccctcatattgcaacctaaacacaagatttaactccagtgtacattacccaccccagtgccgtctcattgtagggtaatgctattcagctatatgcatcccccccaatgcaatcagctttgttcttccctgaagcatgctggggatgaattagggatgaactcaggctaaggtacaaggctgggggtggcatgactgggtcagtggccaaggccaaggaatgccttagcaacaggaaggaaaacatctgggcctggatgtgaagtccctgggaacactgactgcccaaggacatgggagaaaaacaatgagccttggtcctagctggaatggtatataagcttgtgtccatttctaggtggttgcagagcagtaaactggtccagctgccacccagggccatggtcctgtaagtaaccttcccacataggccatatgtcatgattgctgatctggagtcattttttggtctcttggagatgcggatgaccttgggttcaggtgccactgggttgttatccaacactaatcatgtatgaaaagtagaaaaagcctcccagtctaacaaaaccagagggaagaaagcttagtatttgaaaattcagctaatagtagataaaatcacaatggaatgacgatgagaagtaacaccctgaaacgcacaagaatacaaatccacttgttcactcgtttctcctgctttcctgatctagtgacattaaacaatgtctctctgggtaaaacactatggcactgataagaggactaatgagagtctgttgtctttcctgtcctggttctgtcacttaccaccaggtatctttgggccagttaccatcttcgggcttcggctccctcatcattaaaatgttcctgtcataaaatacctactcaataaatactgctgttgttgttagctgccatggagtcagcccctgactcatggtaaccccatgcacaatggaataaatgctgcccagaccgacaccatcccagggatctgttgcaatttgaccgttgtgatccataggttttcatcagctaattttccaaagtaaattgccaggtctttcctcccaatgttatgtcctagctaattacaaatgaaattgatgaattcaacaacatatacttggcagctataacatattacaccctgtcctagacactggggccgccaaaaaagaagttgagtccatctttattcaactaatataggaaggttggttggaaacagagtataaacaatggtaaatgataagctatggagtttggatttgacctacagctggatgagaaacaaagagggttttagagaggaacaccaactaactaaaagggggtgttggtggaggcagaatccagcgatagtcagattgaggcaagaggcccctcaatctagctggaaatgagctatgtggaccaagactaagctaggaaatgggagcagagaaatgaagaccactaaccagtcgctgttccaactcatggcgaccccatgtatgtcagaatggaactgttctttgtagggttttcaatggctgagtttttagaagtagatcctcagtcctttctgtgtgaattggaacctccaacctttcagttagcagctgagtgcattaaccaatcacgccacccaggaagtccaggtgaaatgaacatttcagacaggcattgtgttcattgttaaggaaaacagattagtttgccctgacaggagcaaatagcttccatgtgttatgcattttaacatctcagaaagcactgccctgagaggaaagacaggccagaggattgagggattttattggaaaagaacgtggacatattcaatgctgagaaaactggttccacagtggggagtaaatccagggctcagcatgaagaaattggatgcagtgagcttagaggcaagaatggagaacacacaaaattaacaaaggggtccacagaaaggggaatggagggggaaagaagatattcttttgtctacttcagctttcccccacccccagacctgaatatgtctcaggatatttatacctaaagctttgatgaaaatatgttctctactgataacgaaatttacctgaaccctgtgatacaggaaaacaacaatggttaaagaagtcccaccatcctctgtgttcagaaaaatggtaagcgttcggctgtcaaccaaaaggttggagttcagatccaccagctgctccttggaaaccctgtggggcaattctactctgtcctatagggtcactatgggtgggaattgactcgatgacaagaggtttagttttttattttttgattccatatgacttagataagactcacggatgcctccttgtttacctatgacaaggccagacaaagaccttccaaattcccattctttgtctcataaatgattagctgaactgcttgtccccactgattaaccagaaacaaagtgcttgttaatcaaactttgttaaacttctctccttcccctaaatccttgaactgtggctcaccctcagcctgagccagcatactacttagggccccttcctgagaggaggttagcctcagcctagaacattttgatgtattatcccatgatgttaccctttcatcccacttctgcatgcctgacttttttctagccttgtttactctcatatctataaaagaaaaacatttttcccctaagactttcagacatttgcattaccttatggcccaagtgttttctctatagtcacagctactctcccccactgtcttggattgaattgtgtccccccaaaaatatgtatcaacttggttaggccatgattcccagtattctgtggttgtctttcattttgtgattgtacttttatgttgagaggattagggtgggattagggtgggattgtaataccacccttaccccagtcacctccctgatccaaggtaaagggagtttccctggggtgtgacctgcaccaccttttatctctcaagagataaaaagaaagggaagcaagcagagagttggggacctcataccactaaaaaagcagtgccaggagcagagtgcatcctttggacccagggtccctgtgtagagaagctcctagtccagtggaagactgacgagaaagctgacagagagagaaagcctgcacctggagctgccactttgaattgggacttctagcctactttactgtgaagaaataaatttctctctgttaaagtcaaccatttgtggtatttctgttatagtaacactagatgactaagacaaaatatgggaccgagagagtggggtgctgctctaacagatacctaaaatgtggatgtggttttgaaactgtgaatggatagaagactcagaaggaagtgaggagaactgttaatactagagaaggcacagatggttagaaacagcagcagcaaactggcagcagcagaaccaggagaccagtgccagatagtgctggagccaacccatggagtgagagagctgagttcctgtgcacaagaggtttcctggtggagtggggtgcctccgggaacttatgcatagagctacatagctttggaacacttgtcccagcaagggagatgtgggcgtgaggccccaggagctgagaggccacaggaagcagaagctgaagagacaaggaacacaagaagccaagctgccctagtctaaaaagatacggccaggacctctggggtttcaaagggtggagccatggcctctggtgtttctaagggtggagtcgccactcagatggactaggagaattgtgcatctaaagctgagggagcagagttgctgtccagttggcctggaaggtggagctgaagcccagggccgaggggccttcactcagaatctggagagtgtggccaatacctagaggctggaaggcagggttattgtataaattgtctcagagaacccaggattattttcaaggccttaagggctataatgtaatgtgttctgctgacttgcttggtacctgttgtcccttcttttcctccagtttctcccatttgtaatggaaatgtctaccttgtgcctgttttgccattgtacctttggaagcagataacctgtattttagatttcacaggtaaagaggaattttcggattttggacttggaattgatttaagacttttgctttgatacaattgggtatgttttgcaagttgcaaggatgtgattttttgggggccaaagggtagaatgtcatgggaattgtatcccccccaaaaatgtgttaacttgcttaagccatgtttcccagtattatgtggttgtcctccattttgtgattgtaattttatgttacagaggatcagggcgggattgtaacacccttactaaggtcacacccctgatccaatgtgaagggagtttccccagggtgtggcctatgccaccttttatactacaagagataaaaggaaagggaaggaagcagaggttggggacctcataccaccaagaaatcagtgccaggagcagagtgtcctttggaccaggggtccctgtgcagagaagctcctagccttggggaagactgatgagaaggctgacagagagaaaaagccttcccctggagctgccaccctgaatttggacttttagcctactttactgtgaagaaataaatttctctttgttaaagccatccacttgtggtatttgttatagcagcactagatgactaagacacccactattacaatagtctctttcctccccacccccctttctttctgaataaagcatctctctttcaaagtgtagctttttttttatttgaccctctttatgagagtggattatattagctgctgtgcaatttttggttctggagcaatgtgaagggctatggtatatgtacctctgagatgaccctcagtagtccctgcctcctggtattcataccagcaaaggggaggggaggtcacttctgtgatggtaacttccatcttgctagcaaactcactggagtgccttcttgccctgcacgctctgaagaagcaagctgctctgttggagaggcccatgtggcaaaggatggaggactgcttctagtcaacgttcagcaaaggactgaatgctgtcagcagccatgtgagtgagcttggaagcagattctttctcttcgggtgacacagccccagccaactccttggctgcagcctgtgagagactctgaagcagaggacacagctaaaacacaggagttcctgactctcaggcattgtgagacaataaatgggtgtgatgtttaagatgctaagttttaaggtactttgttctgtggcaacaggtctgtaataccagggccaactgttaatatgtaccccttcccttctaactgggaaaagttctccctatactgactcttgccagagctttttcacactgtctcctaggcctgtgaatctccttttccttatatattttacaatatatttatttatcctattcatttggagccctggtggcccagtggttaagcatttgacagctaaccaaaaggatgacagtttgaatccacgagcagctgcttggaaatcctatggggcagttctactctgtcctatagggttgctatgagttggaatcagcttgatggaaaccaatttggtttttaattcaattcattcacatttcttcaccccatttccttctctatttctccctttctcctttaattaaggcttcgttgcaaacctaccatctttttgtaagaaactagacttcttcccaatacagataatgaatgacgttatacccacaagtggctctcattgatatatacaatgcacatcctttacatttgaaattcatatgtatgtcttgactacttactagtaatatgaccataaactacatgagggtatgacagacccctgatcatagagcgtaaacatctgtgactccaaagagaatagcttgtgcctcatggtattcaatgcatatttgggattaatgttgcaaatgcggtgcaagatttttcatagaaagttcaaagtaaacttaaaactccttcaaaagaaaagttaatgaatttttatgtttacttactgcacacatttgaaatatgtaagccacctaaaaacctctgtacatcttagtagaacaaaagctaagaaaggtaatcacaagacctttacaaggtatcaaaagaatgattcaaaggaaagattcttctcatatctcataaaacccattttcttcaattcaactcatagcgaccctataggacagagtagaactgccccatagggcttccaaggagtgcctggtggatttgaatggccaaccttttggttagcagctgtagctcttaaccactgtaccaccagggctcccatatctcattgagttatctaaaaatatagcattctttatgcactaagataatagaccttactaagcaaatgtaaaccatggtaatttatttaattctgaaaatgtacagttaacttattcttcactaaggataagcaaaacatgctttggggattgtgaaaacctcatttacttgtatttagtacactaaatgtagaagaaagttatacacttattttaaacaatttccccgtactgaacacaacagctgtggaagaaagtcattaacatgatctactccatcatcatttctattattacatcctatttggaaacacagaagcaaaactgagtggcttttttgcttgcactcataaagaaacctgttttctcagtcttctcttatatatcaactttacctaaataatagttttggtaacttatgaacaaacatattacgatccttttccttggattctggaactcactccccactgcccagtacagctgtgtagtatttttgcctagccccacacatcacattacaaagagattcagcacacgtcttcctggagtgataatgcatttgactacatgccacagaaaatatgataatgggtctgaaaagataaccaagtcttatattcgtctggtatttgtgactatgcttttagatgttctgcaaaaagcgataatactaggtgaattagtccaattaccaccctagaggaagggacgaagaaaatgagttttcttcctgcactttcccatccttattaccatccaattttctccagcttattcctcccactgcctcttgtgattttaagtatgatgtaccaagaagatttaaaataggcaaagatccaaaacttttccctacctttatctccacagaagatgaaatgctcactgatatctacagggaaagctatgaattagccagcatatgagctggaggtttatttgcaatttgcaggcggcacaaatagtttgtactcagctaccaagctaaagtttggcagtctgaactcacctagcagcgtggcggaagaaaggcctgaagatctgctttgataaagattactactgagaaaaccccagggagctcagttctactctgtaacacatgaggatgccatgagtcatagttaactatctgatgatgggttttgtttggggttatttgttgtttgttttttgctaccaaggctaaatatgtttttgggaaagggaaagtcttctattttgtatgcttcttgaaccagaaagctaaaatcatgtcgttctatgaaacacaggaggcctagtggcatagtggttaagagcagtttgaatccaccagccactcctcagaaaccctgtggggcggttctactctgtcttgtagtgtagctatgagttggaactgactggacggcacctagcaacagcaacaacaaaatggtatgaagaatggacatagcagcaggtgaataggtattactgcttatttctgaggggtgtgagatattgtcagcagacactgtttggtgctgtggatagaggtgaatcatagagaagtgcctgacactttgttaattacgacaccaacacttcactaaaggttggcaaagagtaggcctatagaatggtaagactaagggaagaagcagaatttcctcagtaaatatagcctgggatgaatgggaacaaagggtttctagcacagtctattggggatatctccattggagtcacaaaaccccagctcattcttgagtgccaggtcactgcaggtctgcctggtgatagtaacacatgttaccacatggtcatctaaagttgtgacaacctctatttgttctagtctttttaaagaacacagtgcaggctcattacagattaattttacaaatcttctgtgaaaattccattgagaaaaagaagaggaattccagaagaaggtaataatgaggaagagttcaacattgcagaaaattagctgcctttcgacctaaaggatgttttgctgctatcccgaacaaaccatgaggactgcttgggagaaaaagatgtaggcttctttaaaagactaggcccaggcactttaagttaaagatggggcttgtctcagggctgaactgactttgagaaggccagggctacagaaggccaccagggagctctccttggtgctagccttaattccttccaccaatgcctcccttgactaaccaaaaaataatagtcccttgactattactgagcctaacagcttccagacgaagacacactaggaaaatcagccagtgaaaacgcgatggatcacaacgatttgatctgcaactgttcgtggggacagcccaggactgagcagtgtttcattccactgtgcttgaggtcaccacaagttagaggccgactcaatggcagctaacagaacaatcttaacaaggacaaagttgccatcactccgtccattgtgctcattgacatactctgcccctttgatgagtatttttgattccacgccaacctacccattctgctgtcttacccctgcctatctcacccaggacaccttgcagggcagctgactgcaatgcaccttaacatgttgctgtgaactgctgcaggctgggggtaagagattagtttccaaggaactaaatgtattgggaggaggcataactttccgtgatgggccagaaaggccatcctttcaagcagtaatgctgacaccctgtgctcatttcttccttgagctggtaaccatgaaaatgacttgtaacatcaagactatcacagacatggggatctgatggttctacttggacaaatcagttcttatagatcatctcagcctgcagcaaccacaaagcatatgacaaatgcccttgtctttttgtcagtcagtgcaactcctaatctgaacggttagagattacgtgccattaaccaacaataacaacaacttgctggtatatatgccagaccctgttctaattgttttccatgtattaatattcatttaagcttccagaaagaagtttattgatggaagaagctcaagctgcactgaaagcactggtgaaaaacaaggctccaggaattgatggaataccaactgagatgtttcaacactgagatgtttcaatgctgggagtactcacttgtctatgctaagaaatttgggaactggtacccggccaaccaactggaagagagccattatttgtgcccatttcaaagaaaggtgatccaacagaatgtggaaatgattgaacaatatcattaataccacacgcaagtaaaattttgctgaagataactggaaaacagttgcagcagtgcattgataaggaactgccagaaattcaagccagattcagaagaggacacggaaagagggacatcactgctgatgtcagatggatcttggctgaaagcagtgactaccagaaagatgtttacctgtgttttactgactatgcaaaggcatttgactgtgtggatcataacgccttaaggataacactgagaagaatgggaattccagaacgcatcattgtgcttatgaggaacctgtacatagactaagcgggagtcatttgaacagagcaaggggataccatgtgctttgaaatcaggaaaggtgtgcatcagggttatatcctttcaccatacttattccatctgtatgctgggcaagtaatctgagaagttagactctatgaagaagaatgcagcatcaggactagaggaggactaacaacccgatatgcagataaaagtgaagaggatttgaagcacttactgataaaaatcaaagaccacagccttcagtatggattacacctcaacataaagaaaacagaaattctcacgactggaccaataagaaacacgatgataaatggagaaaagattgaggttgtcaaggattttattttactaggatccacatatcaacacccatggaagcagcagtcaagaatcaaaggactcgttgcactgggcaaatctgtagcaaaagacttctttcaagtgttaaaaagcaaagatctcactttgaggactaaggtgtgacggactcgagccaaaatatttttaattgcctcatatacatgtgaaagctggaaaatgaataaggaaggctgaaggtgaattgttgcacttgaattatggtgttggcaaagaatattgaatatacaatggactgtcagaagaacaaacaaatctgtcttagaagtacagtcagaatgttccttaggaggaggatggtgagacttcatctcacgtaccttggacaggttatcaggagggaccagtccctggagaagagcatcatgcttggtaaagtagagggtcaggaaaaaaaagaaagacctctaacatgatggactgacacagtggctgcaccattgggctcaaatgtagcaacgattgtgaggatagtcaggactgggcatgtttcattctgttgtatacagggtcgctatgagtcagatctgatttgatggaacctaataacaacaatgacatgtttcaagacgactgtttgtgtgagtagttattattattaaaaccctaaatcatgtatatcagagtagaacagtggtccatatggttttcaatgtttaattttttgaagtagatcacaggcctgtcttctgaggtacctctgggcagacttaacttccaacctttcagttaacagctgagcacattaaccatttgcaacacctagggactacttattgttgttgttaactgtgttgaatttgctcctgactcatgacaaccccatgtacaataggatcaaattgttttatccacagattttccttggctgatttttcaaaagaagatcaccaggccttacttcctaatcttagtctggaatatccactaaaacctgtccaacttcagagcaacatgcaagtctccactgacagatgggtgcaccatgcttgtggtgcactggccaggaatcaaacctgggtctctacatggaaggcgagacttctataactaaaccaccactgcccgcacttattattattacacccccactaattagatgaggcaactgagactgacaggttaaatggctagctcaaggtcgcacagactttaaattagagctgggatttgaactcagtcagtttggctgcagtatcaatacccaaacttcttcacatcctgaaggtatacagggaggttgtatagggcactcctattttagaaggactctggattttttttttttttagattcctttcaatgtgaaacttcagtgattctaaaagaagtttgttttttttttactggaacaaatggttttacccaaaaacatgtgttgtattatactaaagtacaattcatatatatgctaataatttaaattccttattgaaaatactcaattatttaattcctcagtttctcaatttttatagtcctgtatttaatacaatgaactgatacctttgaattatgatgttggtgaagaatattgaagatgccatggactgccaggagaacaaacaattctgtcttggaagaagtgccgccagaaagctccttagaagcaaggatggtgagacttcaattcatgtactttgtacaggttatcaaatgggatcattccgaggagaaggacatcatgcttgggaaagtagagggtcagcaaaaaagaggaagacccctaacaaggtggattgacaacagcggctgcaataatgggctcaaacgtggcaatgattgtgaggatggcacaggactgagcagtgtttcattttgtcctacacagggtcattatgagtcagaactgacttaacggcacctaacaacaacaacaaacatcatatttaatacgttattatatgcataacattactttgaatctatacctttatgctaggcttactggtctcaaaacaaaattcctatagggcatatttaacgtgcttcaggtcccagaacctatctcatgaacccagaaaagttcattgcaaataactgcaaactactatcatccccaagattttttattcttataggaagacaagcaaagacaatattctgaataagtaaagttttcagatcacaaataactacatttccaatcaagcaactaaaaaacttctggtaactgtttttctaaaatgcaccacctactatttctttttcgtggtatcatctggacattatgtaacttctccccgtccattgagaagaatcacatgactgccagttgttgaatatatcttttttcctgtgccttttcttattgtcccttgtctgacactgttattaccatgtttacctctaacagttatttatatccacacattttttctcttatgggattgctgtgagcttagaagctttataaccaagctggataacaatgtgtctatatagtaggatgaagctaatgatgagtgggaaccaccatactctccaaaaaataaaatgcccacaatttagtatctggactctgaggtgctcactgtcactactttaaaagtgtgagtcctttttagattcttagctatattctagaaagttcaggtgatcacagaaataaatttcatagactttgtatagccatataagcagctgtagcaataacaatagaaaagacatatgtgttttaaggcaatagtcaagtgacagatattttaggtcaaatgctgtgctaatgtcacatgatcacattttcattttgccacaactttaggcgatgggcattactgtccccatttgcagacaattatatataaggtcactgaagtaacatgctccaggccacttagaatgtggaggaggcaggattcacaaccagctctgtctgacctggagtaacaacaagcattaccttaactatggggaaagaagcagatgtttattcaggggaagaaaaaaggtgttactggataattgcataattgtggatccaatccagcttttatctaacaaaataacaggactttcaaaaggatctaaaagcagaactgatgcctaatatggtatgatctgactctaacaagactgaatcaatcaatattttttgagtacctatgatgtgtatgggtattgatggtaaatgccttctcaagactctgtaatgagcaacataaaaaaccatcaaagtcgtcaagtcaattccaattcatggtgaccccatgtgtgtcagagtagaactgtgctccacagggttttcaatagctaatttttcaaaagtggattgccagttttttctaaggcccttctggtggaactgaacccctgacctttctgtcagcagccgagcatgttcacgtttgcaccaccccaggactcccaatgagtgacatgggacacatgccctgtctcatagtagaggctaacaaccgtccctcggtgcagggcaggcagctttagggggacacagagagggagatgcgagtagagcagtgtacacaggtggcgccagaaactgctcactggctctccatctccatctccatttgttttcctgctccaaataagctataatcaactctggaaacccatctgacaaaatgaaaggttaacaaggactttcctggttatacagctaactcctttggaaaagaaaatacccctaaaggccctcgtgagactggctgcccaaatcaagaaaagcctcttagttacgtatgcggctttcagtgcaaacaggtactaccagaagctgatagccaaatcctcctcctgcaaagaaacaacgtgtgccaggagggccaccacatgcagaaatgtgttctccagtatagcttaggtttcaggaaagaaaataataagttaggtcattgagaaattttcccatcaaatcacagaatcaggcaattgattctgagatgggagtgaccttggggtcacagaaggatggctgaagatgggtgagggagctgtcctgagggtgatagataagagcctggataccagagtccccaggccagggtctcattctcaagtgcctgcaggggccagaaaggcaaaaggcattgagcggtaggccaggggagagggctagcctcatctaaagtctgaaacctctgcccacttccacctgaccatgcctgctgtgtgcagatgtgagcccatgtcaaagaatgtccatttctcaagagaagacacaaacacaaatttgacagatacatccatattttaaagtgggggattggattccctagtctcccagcttcagcccttactgagaagatgaacatgtaactcaggagaagaacagggcagcatgactgtcgtgcggaggaagccacgttgacatgtggaatcttgccaagattttaagctattaaaaatattaagttggttaccatggagttgattctgactcatggtggccccttgagtgtcagagtacaactatgctccatcgggttttcaatggatgatttttctgggaagtaaatcaccaggtctttttctagaggcacctctgggtggacttgaagcatcaacctttcagttagcagtaaacacattaactgtttcaccacctggggactccaaaactattagttactttatattataactcatacacccagcagacactcaggcctgaggtaaagttgggaacggagagagggccaaggatacctgccacacacatattttgctaaaaaatgaaaactaaaatggccgcaataaatgccctgtggctgtggaggtcagcaatgggcccacgactggctcaggggatggctgctttcagagaatggcagtgggtgtcgctcaacgtctccgccagtggggaagtgggatgattaggtggtgttatgagtcagaatcgacttgacagctacgaacgagacgagattagtttcctgtggctggcataaaaaaattaccacaaactgggtggcttaagacaacaaaaatttattctctcacagttctggaggtcgaagtctaaaattaaggtgttttcagggctgcactcccttggctccaggggaaagtgaactccttgcctcttccaacttctggcttggagagacatctctctctgctctatcatttcatcatggtttcccctgtgtgcctctcttaaaaggatacacgtgactgcatttgggacccaaccaggacccaggataagctcctttgaagaccacctcctctctgtcagtttgtcgtgctgtggtggcttatatgttgctatgatgacggatgctatgccacctggcatttcaaactgcagcagggtcacccatggtggatgggtttcagtggaacttctggaccaagccagactatgaaaaaagacctggcaatctacttctaaaaaataagtgagtgaaaatcctggatcacaacagcatattgtccaatatagggctagaagatgagtcccccgggttggaaggcattctaaatacactgtggctgcaagaatgtgctataccaatgattgtgaagatggcacaggaccaggcaacatttcgttctgttgtacacggggtcaccatgagtcagagctaactcgacaacaactagcaaagacaattcaacacccttaatttaatcatattgtttgtcatataaggtaatgtctacccttttgccattataaggtgatacagtcacagattctaaagattatgatgtggacataactttcgagggaccacaattcaacctactataggtggagaattgcggcaggtagtagagacagcataaggtttcctgaaacatggagcacatcacagcagcccagtgctgggaaacttgtggggcttagcaggatttcagtaaatgaattccattgcagtagtcactgaaataggaaagcatcatgacagtaagagaaggtatgagcagctgccaggttatgaagtcttctgtgcagcctgtttcccttcacatgggctgatggagaaataagtaggtatcagccagatggtgggcctttcagtgtttcagctgtaggaccaagtttcaggaggtgcgctcacttgccaggtggtagtcagaacccatgaaggtaaaaaatgatattgcctggcaagtgcactcgatctaacatccacctcagtaattctcttttgagggaatattatggtgctaccattttgcagaccaaatcaagacaagttctttcagcttactttagttagtaaacttttaagagtaaagagctctttttaagtcatttgcaaactacaatcaacacatccacatggctttatttttcttgtaagatcagaatccctgatcttgaactcagagtaatagtccaactgccttaagatctttcacaattaaattctactacaatggccgcaagctgtggccctcaatctatgagagcagatactacatgattaggaacacatcatcccaccacctatgtgtaatgcacacagtcattagagattatagcactgtgagaacaggacagaggctgagcctaaaaccaggcacaataatcagagtggctgatatctgcatggcttctggagccaggctagcctagccatcagtgaactctgtatgttagcactgttgccatgaagcttgcaagtctaggagaattcactgtggatgctccttagagaaagtgatcatgattaaaataattccatggatagtttctttttttttttttaaaacaatttaattatttctaattttcttgaccgttaacgaataggcattaagaaaaaaatcagaacatgccagtaaaattctaaatggggaaaataaagaagtctgtctggtgaaactctatcttaagaatatatgggaaaaatagaatttttctaattttctgtacaatttacataatctaaggccatggttttgaactttggttgacataaaaattaccagggccagagctgtgttaaaatgcagactctagagatgcaggctcagagattctaattctgatttgataagcacccccaaataattctgttgtaggtgatctgggaacctcactttgaaaaacactgtcctgaaagtggagtcaaccttaatgacatggatggagtcaagcttttgtgatcttcacttgctgatgtggcatgagttaaaatgagaagaaatagctgcaaacatccagtaataatcagaatgtggaaagtatgaagaatgaatgtaggaatactggaagtcatcaaaaatgaaatggaatgcataaagatcaatatcctatgctttagtgagcagaaatgtactcgtattggccattttgaatcagataatcatacggtctactatgctaggaatcaaaaattgaagagtagtggtgtcatactcattgtcaaaaagaacatttcaagatgtgtcctgaagtacaatgctgtcattggtaggataatatccacaggcctacaaagatcagttaatacaacaattattcaaatttatgcatcaaccactaaagccaaagatgcagaaattgaagattttatgcagtctgaaactgatcatcaaacatgcaatcaagatgcgctgataatcaggagctggaaaatatggccttggtgacagaaaggatgccagagatggcatgaaagaaattgcaagaccaatgacttactcattgcaaataccttttttcaacaacataagtggcaactatacatgtggacctcacctgatgggacacacaagaatagaatcaactatatctgtggaaatagacaatggacaagctcagtatcagtcagaacaaggccgggggcctactccagtacagatcatcaactgcttatatgcaagttcaaattgaagctgaagaaaattaaaacaaatccacaggagcctaagaatgaatttagagaccatctcaagaatagatttgatgcactgaacaccagtgaacaaagaccagactagttgtgagatgacatcaataacaattgtacgtgaagaaggcaaaaggttattaaaaagacataaaagaaagaaaagaccaaaatagatttcagaagagactctgaaacttgttcttgaacacagacgaaggagctaagatgaatggaagaaatgatgaagtaaaagaactgaacagaagatttcaaagagtggttcaagaagactaagtattacaatgaaatgtgcaaagagctgcagttagaaaaccaaaatagaagaacatgctcttaattcctcgggctgaaggaaatgaagaaaacattcaagcttcaattttaaatgttttctatgggcaaaaaatttaacaacacagggagcatcaaaagaagatggaaaaaatacatagagtcactttgccaaaaagaattggttgatgttcaacaattttaagaggtagcatatgatcaagaactgatggtactgaaggaagaagtccaagttgcacagaagacattggcagaaaacaaggctccaggaattgatggaatactaattgagatgttccaacaaacagatgcaatgctgaaaacactcactcgtctatgctaagaaatttggaagatagctacctggccaactgactggaagagatctatatttgagcccattccaaagaaaggtaatccaacagaatatggaaatcatcaaacagttattattagtatcataagcaagtaaaattcaactgaagaaaactcaaaaaaaggttgtagcagggaactgctggaaattcaagctggattcagaagaggatgtgaaatgaggaatatcattgctgatgtcagatggatcttggctgaaaacagagaataccagaaagatgtttgcctctgttttattgtctatgtaaaggcatttgactctgtggatcgcaacaaattatggataacattgcaaagaatgggaattccagaaaattaattgttctcatgtggaacctgtacacaggccaagaggcagtcattcaaacagaacaaggggattctgcatggtttgaaatcagggaagctgtgcatcagggttgtatatttttaccatacttactcaatctgtatgcttcacaaataatccaagaagctggagtatatgaagaagaatgcagcatcaggattggaggaagactcattaacaacctgtgatatgcagatgacacaaccttgcttgttggaactgaaggcgacttgaagcactttctgacgtagatcaaagactatcgccttcagtagagactacatctcaacacaaagaaaacaaaaatcctcacaactggaccaataaagcctcctcacaataaatggaggaaagacttaagttgtcaaggatttcatcttacttggatccaaaaccaatacccatggaaccgggagtcaagaaatgaaatgatgcattgcatgaggcaaatctgcagcaggagacttctttaaaatgttaaaaagcaaagatgtcgccttgaagactaaagtgtgtttgacccaagccatggtattttcaaccgcctcataagtgcgtgaaagctggaaaatgagtaaggaagaccgaagcagaattgacacatttgaattatggcgatggtaaagaatatttaaaatactacagactgccagaagaacaaacaaatctatcattgaagaagtacagccagaatgctccttagaaccaaagatggcaagattcggtctcacatacttaggacattttatcaggagggaccagtccctggagaaggacatcatgcttggcaaagtagagggtcagcaataaagaggaagacccctaacaagatgtattgacacagtggctgcaacaatgggctcaaacatagcaaagattgtgaggatggtacagtactgggcagtgtctcgttctgttgtgcattgggtcgctgagttggaattgactcaacaggaactaacaacaagatatgtgggtgctaaaaattaaccataattacatggaacaatctattcagaacaggacaatattgcatatgaatgtaccataaggaggagttgtttatcatacatttagcaaagatgttagacatattttaaacataaccttaatttggaggatctctgctttgattttcctccctctaaacactgcttggaaattctacatctctccgctttactcagaattaacatcctaaatatttagagagaaaaaaaaaattaaatccctttattcaataagaagcacaactacccagaccctgcaagaagcacaactaatggaactgaaaattaattaaagtgtggtataattctcttcaatctttcaatcttctgtttctatctaataaaaatctatctcagtctataatttttcatgattcttatacaactagaagtaatacctagttctggtgcatttatacctcttttcaagtatttcttatatcctacactaaaatgtgattgttatctactgtatttctacacaaataacgtgtgccttctatatttgttagccaaacacgcctctttgacatttttgtaagcacaccatgccaattttttttctacagcaacatgttaaaaaaaagattggcacagtggcacttataaaagtacctcattgggggagggcatagctgacaaacaaacacagaaggcagtgtgttatgtgtgtataaacatccatcgtactccacttatgtcttttggaatcaggggtatgtcattctccatccatgtgtttgtccttagcacactgccttttgaagaagatagaaataaaaggttattatattaaattaaggagccctggtggtgcagtggttaaagcaattggctggtaaccaaaacgctggcagttcaaacccaccagccattcacaggagaaagatttgacagtctgcttctttaaaagatttatagccttggaaactctatggggtctctctgagttggaatcaacccaacggtggtggggttggtttgggtatgttaaattaaattaaatggcaagtgtgtatgcgattttctatcctaggatatttacataattcattctatagatatacacgtgtttagaaaatctatttaagtctacaaatatggttctagaaagaaattgtttttgaaagaatccaggaaaaataaaagtgtatgccaaatcttggcaacttctgaaagattaataaagcccagagtagaagggatctcatctcaggcatctagatgtaaccaggcagcagtaagaatgagtcctttacaaaagggaattgatcttgataaatttgaaatgcgagattgtgaacagttgatgtgttctacatttcagactcaagctacatgagcaaaatttttgttatgtgcaatttctgtatttctctaagccatgcaaaattgatttaaagttattgaaatttctcctggataatttctgggttgttcattcaaatttggagttgctaagaggtttggaaggcctgaatgcaatgacaaatgttagctcatgcaaaagcaacatcctaagaatggtgatgattttgtaaaatacccaaaagaagatctgcatatttcaggttctttgttgttgttactgtggttagttgccatcaagtcagttccaacttgtggcgaaccccatatatgcagagcagaaccattccacaggttttcaaggctgtgaccttctggaagcagattgccagccctgtcttctgaggtgcctatgggtgggtttgaactgccaaccttttgtgccacccagaaggagttttgcatattctagttccttaaaaacaaaacaaaacatcgccacggagtcggttccaactcattgtgaccctataggacagaatagaactgccttcacaggatttccaaggctgtaaatctttaccgatgtagactgccacatctttctctcatggagcatctgatgggtttgaaccaccaaccctacggttagtagacaagtgcttaaccactgtgccagcagggctcctttcagctacattaaaaaacccattgttatcaagttgattccaactcatagcgaccctacagaacagagcagaattgccccatagggtttccaaggaatggctggtggattccaactgccaaccttttgattagcagcagaacgcttaaccactgtgccaccagggcacctcagttatattagcggagtacaaatgtatgttccacatggggcaaccgtgaaattttgaaaaggagatgctctttactgttctctgaagttccctacaactaaagtgcgggaaagaagaggaagttgctgaagtgtagggagtgctgaagattcacaagagcatttcttgtacccacttgattcctagaattggaaaatgtcacagcttctctctataatcagtcgtataataagaaatcacaaagcctaccactataataggaatgatcatacattttgatgaaaacaaagactgacgtgactatttcagttttagtttggatgacagtagtgttaatagcaggaatctaaccagtagttttcatttattgcataagccttaagacgataatacccatatcagaattttttttttctatcacctatacacactcagtagagagtccctgtgtgacatgaacagctaaatgctcagctactaaccaaaaagttgggaatttgaatccaccagagctgcctcagaagaaaagcctggagatctacttctgaaaagttatagcgattgaaaaccctatggagtgcagttctactctgaaacacatggggtcgccttaagtcggaatcgactgagcagcaactggtttcaactgctacacagagtcagtagatagatactttaaaggatgtatttatacaagacagtcagatatataaaaacatgtctatagcattgtactgtgctgaagtatctgaactgaaattgttttctttatctgcgttgaggtttaacagccctgttatagaaaaggttgccctgctttaagtgctaaatgaattcctataaaattacatgagatgaaatatgcacctcaggaaagaactatcttgagcaaatatttgaccaatctaatcaacagtgaacatatacaagtcctttggtctgtattgattaaaactgcaaacattgcctcttttaaagagaatatcttcagccccacaagtaggaaggaaataaacaaagaatacatgttctttgtaaaatataggaggaaacttaggcttttatcagaatacttttttctaacaaaaattctcagtgtcatcctcattgcagtttacattttgtgaaagacaaacataccgaagaatattacatactcctttgatctgcctctatttttatgatattcctgacaatttaccaaaagatcatctgataattaaatgtgatcaatttttattatgcaaagattcgactttgaacttttattatagaagacaaccatgcaacctaactttataccaacctgctttcccactgattttcatatttacacagcccaaaacaactaattggtaaggtatagacagcacctagcccaaagcaggacaaaaagagtgagcacttcatcatcgtggtacaccgctacatagctaatggtgtactaatgtggccagtgttgggagacatggtacaggctggtggtcaatttctttcttagcccacacactaactgatttgagatgctcttccaaaagaaagttgggctaacagtaaaataatttctacatgaaaccaaagaattagtttgtgaaaaattaattgctctttaaaatatctctgataagtcactagatctgactctcttaaagttgcttttatattaacatctaaaattttgatttataccagaatagtttaagtgcaacgtaaactgacgtagatgatgtgtgtgtgtgtgtgtgtgtgtgtgtgtgtgcatgaacatgcacatgctgtttcctatttcctatagttaaggattaatattaattaaagattcactggacttcatagattcaaccacatggagacaacttgtcattggcattattgattttaacctcatctaattcaaccccaattaaatagatgagtgaaatctgcatttattctagggtggcccagtctactaatttcatctcagtgtcagtgttctttttgtatatgagagaccctagattttacatacgaacttaaacatatcaacaatcatgaggatggtacaggaccaggcaacatttcattctattatgtataaaacccacaaaaccaaacccattgccattgagtcaattctgacttatagggaccctataggacagggtagagctgccccatagggtttccaagtagtagctggtggattggaactgctgactttccggccagcagccaagcttttaaccactactgtgtaaagtcatatacaaagggttatgttatataaagggttttatatagactcaaataattctaaaagatcatcagatacgtcatagatttttaaagaattggatctgttaatttaaaaataaaaataacctcaaattaagccaaaaaaaaaaggacatgtgaatttgaataggggattaactctattgtctgctggtgacacaattatcagaagtgatagacatgcactcttgcatctaagaaaggccttcttcaggaatttctgcggtggggtccaccctcactccataggtctcaggaccagtcctgtgaggaccaggtaggagggctggccttccaatggagtgggggttctgtctcaagacccatcaggattgaatggggaatcttacagaaccctgacaatgtttttgttttgggcttaacattttatatcacatattattctgtgaaaaagaagacagttttccagggaactaatttaacttttggaagaaaaatagactagaagaggtaaacaggaccgtgtttagtcagtgctgagtatttatgctcctgtttacccatcccatcatcaccaaaccaaaaccaaacccactgccatcgagtcgattctgacagcaaccctcctcttttttcataaatgaagaaattatgtacatgtcaaacacttccttgaactcttctaacatttacagactcgaaagtacagtttaacaccattaagatttgtctgaaattactttctaattgttacccaggagttgggattgtctatcaagacagcttgctagttatctgcctatagcttctcacatgctgtctagctcatagtcgatgcctgatcaatgcttgtccctggcttctcttgtccctctttaagggcaaacacatgatctcacactttgttgtcccgcctacctccctgtgctggtcccagctcaatgctgagcacacagtttggaatactgtgacaacttctacgaccggcaggcagatagactggcacagtgaaacccatatttgtatgcttgaaataatctataaaggtacaatccctgcccaaatggaataataaatcccactaaagattcagaaactccagaagagaaagcccagaaacagacccacaggcatatgaaaacttgggaattgaaaaaactgacattgcagacaagtgagaaaaaggctagtcaatacatggtgctgggaaataatttatgtcaataattagatatttacctcattctgtacataaagatcaatgttaacaatattggacggtatctttatagtctttaagatttcttaaacaagactccgaaagtacaaataacaaagaaaaagcttgataaatacagctgcattaaaataattttgttcatcaaaatgcacaatacttgaaaaaatgggcaatagcgttaaagaagatatttgcagtacatataaaaagaaagcatttgtacgctatatatcattatggagcactggaggcacagtggttaggcactcagctgctaaccaaaaggtaggctgttagaacttaccaggtgctccatgggagaaagatgtggcagcttgcttccaggaagattaaaaaaaaaaaaaaaaatctgttcctgtcgagtcgattccaactcatagtgaccctataggacagaggagagctgacccacagggtttccaagatgcggctggtggcttcaaactgccgacctattggttagcagccgtacctctacaccaccagggttaaaccccatggggcagttcccctctgtcctatagggtcgctatgagtcagaactgactcgacggcagtctgtcatatcattaagaagaacacaaacaatccaatggaaatacaggcaaactacaacaagcaggcacttcacattaatggcccataaacatgtaaaaagatgctcagctccatgagcaatgagtaaattcaaattaaaaccacatgaagtattatttcacaacgttaagactggccaaaatacgttttctaagtctgtcaaagtcaaaacttggaaggatatggcattctgggaattttaagcactcctagtgggagcataaattgttataaccattctggagacgaatttggcaagaccttgtaaagtcaagaatgagtacatagatgaacccagtaatttcactcccacctatttaattgcccctagagaagctcttacacgtatgttcaaggaaaatgtccaaggacgttcaaagaagctcttgtttgtaagaaccacagggacagatgagtaagcctgctcaccctaatgatggaatactatgtagcacagaaaacaaatatactaccagcatgaaaaaaaaagcctccagaggaaactgttgagtcagaacaagagacagctatagaagaatacacatagtgtgtcaccacttttataacattttataaatacaaaacaactctgcatatagactgggggtccataaacaggtagtaaaagtaaaaagatatgaacgggattaacagacaccaaatttgagattaggctctctaatcttaaatctacaaggacgagaatggaatgaaggagaaatacaaagatagccataacgttatttgtaatattttatttcttgagtgctgaggaaataagtgtgtattatattagtctttctataattttgatctaaaacattctataatttttacatatcaaaattatttttaaaataattaccaaatatattttcttaaatatattaaaaatttaaattcctttaaaaagttttgaattcttaaataaatgattcaaatgtagagtccttccaacaaagctttaaatttcattagagagaaactaactgctcccttagaaattattcaaaaaagtatatagggtattaggtaaacctttacaaattatttcatgatttcaggaaaaaaaaaaaaaaagattttctggaaagggaaagatcaacatgagatttttccataaggaaagaaacataagaggctgagataacgtgttgctcttttggtagaagtgagggtggccaagcatctttgtacctgcctatactatttttggaaaccctggtggtatagtggttaagtgctacagctgttaaccaagaggtcggcagttcgaatccgccaggcactccttggaaactccacggggcagttctactctgtcctatagggtcgctatgagtcagaatcaactcgaaagcagtgggtttttggtttttatactacatttggaaactctgatggcataatggttaaaagctacggctgttaaccaaaaggtcagcagttcgaactcaccaactgctccctggaaaccctatggggcagttctactctatgctatagagttgctctgagtcagaatcgactcgatggcaatgggtttggtatattatttctggagccctggttgtgcaatagttaaatgctggactgctaaccaaaagttcagcagttcaaatccaccagccactccttggataccctatgtgggtagttctactccgtcctatagggttgccatgagctggaaccaactcgacagcacataataacatactatttttggctttatctcttatctctataaaaaaaaaatagtacaagtaagttgataggttagcttatcagaataattcatgccaaggcaaaatttcacaatgatttgcccttgttcttctctttggccactgggacccacttaaagaacaatattctggacttgtctgcagtaaattcaattatacacgttcatgcccaaacccttttctctcatgggcttttaatactcattcaagttgccaagatgatgacgatccttaaaaatcttcctatgaagtgaacccaatctatatatgtttgaaaaagacatgaaacaaaaaatatatatatactggcttatgaaccctcacagtatttcccccaccatggctaactgaaatgagaaacttgcaaaaaaaaaaaaaaaaaaaatctggtattatttttgaaaataattattttgactttaaacttgaaagaacacatctgcccccacctccttccaactgccaggatgataataatgtaattgcagctctaattacaaaggacttcaattcaatttaattttaattatttaaaatttgtaaacactccaggaaaacctcattaagctggatgagccagcttgttttcaagagggaccagggagtcaacatttacaattattcacattacagcttccattcactcacactaacaattctgattaaccagtaatcacactcatttggcatgagctgtactagcaaatcttgttacagcttttaaaaatgatttccaaagctgtgtatataaatgaacccccacaccccacaacagccagaacaactctggcctgcatgcacattggagaacgaatagaccaactgccacgaaatgtgatgcgttttgtgcattttaaaaagtttatttgtaaaactgatgtcttagggtccccagtgattcaaggtcaagtctctgaaaataagatgtgaatttacacactgtcaataaaccatggtgacttactgtgacgtggggttcacagtaagtcaaaggaaggctaatcttccacaagatattatatttagaacaaaattgccatgggatgcagcagtggaaagaccactggattagaactgagggtacctggataagacctatgaacacctgttgtcattgttagttgatgctgagttggcttcaactcacggtgatcttatgtgcaacagaacaaaacgttgcctggtcctgtgccaccctcaggttcattggtatgcttaagtccattgttgaagctactgtgtgaatccatctcattgaggatttccccctttttcactgaccctctaccaactatgatgttcttttctatcaattggtccttcctgatgatgtgtccaaagtaaaccagacaaagtcgcatcatccttcttctaaggggtacctagctcatacaaggacacctagctcatacaaattactgcctgtgaggcccgtgatacatcttctaacctctcaacatttgcttctcattaagaaaatccaaacatgaataattaccccatagagattttgggaggattaaatgtgcctgccatatagaaggcatgtagtacatgtcattaatagtggtaaaaatgctgaaaccaagacagttaactttcagttacctagttcatagttactaacactctagtaattaatgtccaattatattttagctgaaaaaatctgagattttaagaagacatcatcaattggttcatttaattacgagaattacagtaatggctgaactaaggctgtgtgtattacacaaaggacaaaaaaaaaaaaaaaaacccactgtcctcaagtcaattcagagtcatagtgaccctataggacagagtagaattgccccataggttccaagactgtaaatctttatggaagcagattgccacatcttcctcctgtggagtgcccgatgaactcaaacggccaacattttggttagcagtcaagtgctcaaccattgtaccacctggaaaaaaaaaaactgcctttgagttgattctgactcatagagaccctgtaggacacagcagaactgcctcagagttttcaaggagtggctggtgtattctaactactgaccttttggttagcagccaagtgcttaaccactgtaccaccagggttccacataggggtcatttccagggttaataaaatgttgtccaatataaaaagtctctggacaatacgaggctgcctgaatgaacatactcactaggcaaattagaatcccacatggtgatgtaacactcatactctctgattttaccagacctgttttcatctattattgaaattttttgacacttcctacaaagacttggctagaaacaggacagtaacaattgttattatcactcatttttatagaacgatttcaatttataaaatgattttaagatacattgtttcagctttgtccccacaataatccatggatctggtatcatgaccccattttacagacagctaacaatgttctgaaatcctaggtaatacagttaatgcactcagttgctacctgaaaggttagaagttcgagtctactcagaggagcctcaaaacaaaggcttggtgatctcctttcaaaaaatcagtcactgaaaaccatatggagcacagttctactctgacacacggcgttaccatgactcagagttgactcgatcgatgacaactggttttaacaacattccgtacatttcaataggagtctctgggtggtgtcaatggttaagtgcttggctactagcacaaagtttggcagttcgaattcattcaaaggagcctcagaagaaacgcctggtgatgtaatgctgaaagataacgaaagccctgtggagcgcagttcttttctgaaacatatggggtcaccatgagttagaatggatcccatggcaactgtttattttttaaccatttcaatttctggacaaaggcttataagtgtaggggaatacttgaaccctggctttctgatcaaaaatctcatactcttttctggtcatcaaattattctgtaaacatactattatctaccagcacttcatttccgtacatttataaagattaaaacggtgaaagctccgttatcaaagaaagtatgaaggacatcagatttcacaatgttggcaacttacagggagacgccttgccaaattaactattattctagaaaataaatgactctgtgatccctgcatttgctgcataacactgaattgtggttttcacttggctgtttcctccatctgctctgccctgagaacattctcactggtctgcaaagagaactctgaaggatttgagcaggggtgggttttgcacaagtgcacctaagcagccagtcatcttggtcatctgcagtaaacagaagggtctgagtagtggaaaagactaaccagttttttcacttccctgagaaatgcattgtcacagagcaccctggccatgtgcacgtccttttctccactggagactcccatcccactcacctcggtcaccaggcctgtgcttgcagctccaggcttgacatgccttggcccttggtcagtcaccctaaatccccagtcatctttcaatgttcctcttccatgaacactgaacaaccaccatgtaagatgtgctgggctagtgctaaagacaaaaggtatacagaaaggaatgtggccccaagaagttccaacagagggagggacaaaaaatattcataaatagataattgtcaattcagtccaatgtcctaagagccaataagtaaagatagataataaacaccattgagttgaggggaggtagtcaccacctataatgctggcctttcccttctctgcttttcacggtagctcacaattttgtacccaccaggtttcttacaatttctccaatgtcctttcctgagagtgtcagccatatgacgggagggactgggtgatattcttctcaagggctccccacagcacctggcatagtctcggttacaaagttagggctcagtagagatagactgttctactctgccctacagggtcactatgagttggaattgactcaactgaaatgagttatcttttttttttgagagatgcattaaggcttttgttaatataactaaaacaacggactcaagcataccaatgatcatgaagatggtgcagaactgggggtaactatgagttggaggtgattagaaggccactaacaacaactgagatatgttaattgatttacgtagaagaatctacgggcaggagttacaaaaggctatcaacaacaacaaaaaatactgaggagaaatcagaattcttgaaaaagaaaggttacactggcaaaagttgtgttatatatttacaacaaggaccaaaaaaaaaagaatagctgctgaggctgcttatgtacaaccaatagactaatgggatttggtttcttggtttggaggtttagggtcatgtttcatggtacaatccagttaactggcctaataacatgtttggtgcctctgctctacctcctagtttgaggcatggtgtctagggcctcaaaagcttgcaagtggccatccaaggtacaacaactgacctcttcacctggaacaatggaagaaggagagtcaggaatgagagggggataggggctgtgtggccaatttcctccgtgaacgactgcttcctttgccatgaaactacaagaactggatggtacccagcaaccattactgaacatctcgatcaaagattccacggaagcatcctgatcaaaagggagaaaacgcagaacagaacttcaaattctcatggactccagacttcctggagtcacgaaggttggatgaaccccagaaactactgccctaagataatctttaaaacttaaaccaaaaatattccctgaagtcttcttaaaaccaaacaatagtttaacttaagtagtaaaaaatgtctactgtgagcatcatgcttttttaagagggatctatatgggatcactctgacaacagcaactcaaaggttagataggaaccttagggggcagtgaatttatgtcagttggggagaaataactcagaaaaggaggatgagaatgattacccaactcaaagcatgtcatcaacatcactaaatggtacatctagaaactgctgaattgtatgttttgctatgtatattctcaataacaaaaaaaatatataaaattatatataaaaaaagaacagaattaacttagtgagagaaaaagaagggtggttttatgataacatgttcatttaggcaggaaagaaataaatgagaagcctttgcaccacttgaaatatgcattccactagctaatataaagcattctttcctgtttataaaatgaaaacaacacaaagatgatcatgcactttatactaaatctatttggggaaggaacaacaaaattttctccactcactcaattcagcctggaatataatacacaaaatgatctaaaaagctgccatttatttcctaaaacattagtctgggcttatttttctacatttctacattaaaatatgtccctgaagattcagacatacattctcaggggaactgttctacagcagtttggtataatgttgactaactatctgagcaacaaactgaacaaaaggtcacttacattcttcatttatcactaaacaagctttggtggttgaaaatacctgttaacctttctttgtcttgattttgccacaaaaagaaagagggataaaagagctcactttgaagtgtacgtgtgactgcacacatttgtgaaattctttgagattctcagttggaaacgctattggaatcattaaaacttagagaaacttgggaatttgaatcctttaatactcgaaaggtaaagtaatcagattaatggattttttttcttagtaaatcttttcaagagtctgggttgttcatcagatgttttccacttctctgttgaaaaaaatgacttgggaatttcagtacagaaataaaagccaaactcctaattattccctccacgtggtcctctgagacaaaagctgatctggggttaaacttattctttaactaatcaagcactttttctttaattaaacagcagtaacgacttttttttttttaacgactttatacacagctggcctcattaaaatcaaaataactttcttacagttagcagagggtaggtgagtgatgaccaaaaagttcctaaaaaaattacctgtaccagatgaaacctttagttagagagtaactagtgagaaagatggaaactctggtggcacaggggttaagagctatggctgctaaccaaaaggttggcagttcaaatctactaggcactccttggaaaccctgtggggcagttctaccctgtcctacagggtcactataagttggaattgacttgacagcaatgagctttttggtttagtgagaaaaagataaaaaggaaagtgggctggagcagttccaagattggatgggtcaaaattaaaacaggcgctgagctgagaatcctgactacaccaccaaatgaactgtttgctagcattcacaacatgccaaacccaggtctgcaaggccttaccttgagcatctcagagcactgagtagagaccaggtgtgtggattaaagcccagaacaaaattattcatcagttattatataaaaagcaccaggaatatttgaaagaataaaggtatgtcacccccgaggtgatttaactgtgcttttttttaataatattcaaatgatctcccctaatttaccataagaaatttaaaaaactgagcacgaagtctagaaaatggtgggcttttaatatgtatttgctgaatgctgcataaacatgaatgtaaatgaatgaatgaaaaggctaaaagagaatgcactgacctgattcaataccctcatgttctagatgagaaaagtgaggtctagagagattagtaaggagccccggcagcacaactattaagcactcagctgataacagaaaggttggcagtttgaacccacccagaggatccacaggagaaggacccggcgatctgctactgcaaagatgacagacagccaagaataccatactcagtcacagagcgtagctggtatggattgaattgtgtccctccaaaatatgtgtcattttagctaggtcgtgattcccagtattgtgtggttgtccaccattttgccattcgatgtgattatcctatgtgttgtaaatcctacctctatgatgttaatgaggcaggattagagccagttatgttaatgaagcagggctcaatctacaaaattaggttgtatctggagtcaatctcttttgagatataaaagagagaagcgaccagagagacagggggaccttataccacaaagaataaagcaccaagaggggcctgtgtccttttggacctggggtcccctgcactgagaagctcctaggccaggtgaagattgatgacaaggaccttccccagagctgacagagagagaaacacttctcctggagctggcaccctaaattcggacttttagcctcctagactcagagaataactttttctttggtaaagccatccgcttgtggtatttctgctgtagcagcactagaaaaactaagacagtagctgcgagtctaaatcgactctctggcacctagcaatgacagagatgagtgccctacccaaattcacatgtgtattttttcagtaaacctttatggagggcctagcagatgccaagttttatgctacaaatgggctaaaaagatgaataaaactgtcctgtccctgtgccagcctgctacctctcctagaatgctctgtgacaaaacatttgtcactggttttcatcagcagtgcaagttaaatttctaggttcacaagtcagaggctcagtaaattgcttttacttttcatgaactacaaaaaaacagatcatgaattcaagtcagtctctgtctttccccgggctttgctcagtagctgaattaaggaatcaattactgactactcacatgccccaagaccccacccatataaagctaggccacaactattagagccgagggtaggcaaaagggggagggaagaggccactagctgttaccttcctagaaaggactagaaggtggaggcagggagtaaaaaatggagggttagctataaaaagcatctacagttttacctcagttaaaaacaacatccaattttcttctttaaatggatgaatagcaattaatgcgaaacattttactgaatacattttattgagcataacagaataattatgttacagtaggtctctttgaagggatgggagaaaaggtgcaagaaggtagtagttaaatggaatgctacagagaaaatatatcagaaccataatacccttaatgtgatatgcccctggagtgggaactgagaaaggaaggaaaaaaagtagaagaaaatggaaaataattgaaaagtacagttattctggaggtaaattttagttactgctcatctgagctataaccttcggagtgataaaatcaaattacctactgcccttcccttcatttggttagctggcgaatcgctcttcacagctctttctctgtgttattctagagtggctaggagaagctttatttgacagtggctgggactaacagtccattcctcccctgggctgtaaattccaaaaagcaatactgtccagaaagcaaggtggtgtgtgcctgaagagggaatttgacttctgaccgaaagtttgccatccctggtttagttatccaaactaaactaacctttttaccaagcagcaaagactaactcatattctaggaaggtatttgctctcacttacttgctcactattctaaccacaattttactttcagacttttgattttccaatccatgttttctttctgaaatccagctggactacagatatcagatcttaattatataattttgcaaagtgacctttaaaaacctcacaggttaactttctttaccctctggatcctgctgagccaagcatggtcgcgcagatcggctctagtctaatctgcttcccttacgatttctattctctttggccaatttccattttttgttttcaagtccaagttgcgtaggggataaggtttcaaagcaagctccagttcctggtgcctttgcatagctttggttttagttactacggaaacacttctttgctgtgctatactgtaaatcctgtaattcccccttctcctaattcttgagtaatccctttaaactgcaaaagcaaatacgatgtgagcatcccataaaacatatagcttgcaacctaataagtgggaaagcatatataatttaacaccagaatttcatgttaattttcattagaaattcaagtattccagggtaaacagatgaatggatgagacaaatgatagagacagccagggcatccaccataaccctgtggggtttatcaatatatagaaagatgtaaagaaagcaaaggcaagtcagaagtcggtacaaaatttaaggttaaatctctctgatcttgcaagaaaattcgggcaacatttaattatacactaattctaaaattgtcaaggacttcattttacttggatccacaatcaatacccatggaagcaggattcaagaaaccaaagaacacactgcattgggcaaatctgctgcaagagatctcttgaaagtgttaaaaagcaaagatgtcaccttgaagattaagaagattaagacgcacctgctccaagtcatggtgttttcaatcacctcacatgcatgcaaaagctggacaacaggtaaggaagactgaagaactgacgccttcgaattgtggtgttggtgaagaatattgaatataccatggactgccagaagagggaacaaatctgtcttggaagaagtacagcagaatgctccttagaagcaaggatggcgagacttcatctcacatactttggacatgttatcatgagggaccagtccctggagaaggacatcatgcttggtagagtgtcagtgaaaaagaggaagaccctcaatgagacagattaacatgggggctacaacaatgggctcaaacataacaactgtgagaacggagcagggccaggcagtgttttttctgttgtgcctggggtcgctacgagttggaactgacttgataacaattctaaaacagtttgtttcaataatattgactcaggaactcatttattctttcagcaaacattagctgagatcatactttcttcaagaaagtattagaaatacaaccagatgttatatccccgtcccagaggggagagaacatgcaaagaaaaattagagaacaaagcaaaatacactaaaggttaaaaaacagcaccatgtgctatgagaggccaattcagtttcttgctggatgaggtattaggagatcccctaatgtaaatagagacatttgtgctgggccctgataccactggaacacgctaagatggtggctgtgagaagaatgtgtattccaaagaacacaccagttgctgtccagtcggcttcagctcatggtaaccccgtgtatgtcagagtacaacagtgttccatagggttttcagtggtttattttttggaattaggttgccaggcctttcttcctgggcatctctgggtagacttgaaccatcaacctttcagttagcagccaagcatactaaccatttgtactgccactcctttcaaggaaaatgtgagcaaaaacttggtgtttcgctatcaagtgtttatagaacatcaagtcgaccaatttcataggggaggtagattaagggaagtcacagccaggccaaggaatttcagttttgaacttcatatccattggtgatgggaagaatatatgaaacttttagcagagatcaggagatggaaacagagttaatccaaattatcctttaggaagaacagcaagatgtaaaatagaagtaaattggagtaaggagccacagaaggcaataagattagttagaagtggttccgatagttcagaaaagaagtaacaagaatccgaagtaaagatgtgcaggtgggaagatgcgaatgggagaatgtgtgtgagagaagatacagaatggacaacatttaaacgacaatcaaaaaggaagtaatcaagcaaaagttgcaaggtttcacctggagtgactgagatgcaatgtggtggtgtttttcacagaaaaattgtggttgggaggaagttcaggttttggtgaagtgggatgagtgtgaagatattggccatatacttgcagacttcgagatcctggtatgatttccagatagtaatggttaccacgcaattggaaatgcaggagtgggtaccagaagaatattccttgctaaaaatgtttattcaggatgcattatgcttccttaatttgagaactgatgtctttcatcaattctggaaaactctcagccattttatcttcaaaaatgacctctatccggttctattttctctccatagaactctgattagctctattttgaacctcctcactatattctccatgtttctcaatcttcttttactattgtccttctatctgtcagtttatgctgtgttgtgtttctttagatatataccccagttcagtaattctctctttagtagtatctaataagttgactatgccatggaccacaaaaacaatgaacaaacctgtcttggaagaagtacaaccagaatgctcctacatctcacatactttggacatgttatgaggagggaccagtccctggagaaggacatgatgcttggtaaggtagagggtcagtgaaaaaaagtaaaaccctcaatgagatggattgaaacggtggctgaaacaatgggctcaagcattataacgattgtgaggatggtgcaggacagggcagttttgttccgttgtacatagggttgtcatgagtcagcattgagtcaacagcacctaacaacaacaacagcactagcctgtttaatacatccatttagattttaatattattactgtatttttcatttttagaagttctatttggctatttgtcattttttctaattacttttactcatcttgtttctctgtcatattttctatgtgctcatatacacacacactataatctgtgttttctagttccattatctatatttaaaaaaaaaaatgaatctgcagtttgtttttctgctaactctgacttctgacctgtaattaccttctgtttgctgatttctgattgttagtccatattgctcagaattttattctgtgaatattctctgctgcccatgtttagagcatgtttaaagtcagggtttgtgtttgcttatgtgaagaacctggggaaattgcaaacttagaactaatttaaactaaattttatgctttagtgttttcaaaacatacagaagttgagagcactagcactaaatttgataagaaagagtggttaggaaatgctcagggaggaatttttctctcctttttttcccactaatagtcaaggctgagctaagcaaacatctccactgttacaccttcataaatgttcatttttcatgattcacttgttaaaggtgtctatacctggggcggggggcgcgtggggggacgcagttttatgagggcaatctctgatctgatcaccttccaagaatcccaggctttaattgtattccctgcatgtgagtgaccagttaatactcagctcttgatccccaggaattagtaaattgaggcaaatcctgtgctggctaactcttctggatttgttctttctccttatttctgtcctttgattaatggtttatcttaagttcccatcattttgtgacaagagaaagttcttacaaatttctctctctccctgaaccttacatacagaaacccagaaaatataaagatagttcaaagaggaaattcgaaacaaaaaagtaaagtattctttccaagatggaatggcatactcccacttttatcaaattcagtttgggatttcctcagccattaggtatccagtagaatgttctgattcattgttcagcaaaattatgagtcacacactgacatttattaaagctttggtctttaaggaggcatacattatcatttcaccacacaagcagctataaaacatgccaactagaatctcaaatttacacatttttgtatgaggtattctaattgtctctacttaactaccccctgaaagtctactttgaacaatatgttttagtttgagacaacaactataattcagagaattaagtggggagataggaatgaagaacggtaatatcacaaagaatcaaattagaggaaggcatgacttatctaagactctagacttgatgctaaaatcaaggcatgccatgagccaagggttggtaagaattatgatccagttagacactgaacaagtctcccaaaccaaaagagtgaaaaacatgtatcaagggtgatacgtaggacctggaattagagaggagagtaagaagaagctatgagcagagggttgagtctagtattaactaacagcttgaaccagttaatttttacctcaaggtatggaatgcagtaggtcagccatatttaaaaggttggaagatgttatggactctcccaattacaagatactaatttatttaaacattaaagaattgaaatgtcattttattcatctattcaaataaaaactcttaaaatcaaaagaaaacagacataatgcccatggtcaatttaagctctgacatgcacaaacagaggatgaaaaggatgagttgggtgatatccattatattatttactctgtctacagttactctctctccacatctcattgtaacagccagatgcagaactacaggaaaacacgccttccagcagtgacacctgtccttttggtaagggagtcatgactacagctggtctttttggagagattcctgaattttccatctggctaggctgctcttgacatgtgcctgcctccttcagaggatgtttacctcaccatgagctttaattacaggaacaataaatgctttctttcttaaaattacttacaacagccattgagagatagagactgatacctgtgtccatacttcaatctcttctactttcccattttatctacttaattagatcactcttgaatccctaacactaacctgtactctaagcaggaaaataaaataattgaatcttttatctgatgaggattcctttatctttgtcttgatgttccctgtgtctggaacattcttttgttctctacctacccagatcctgtctatccctcagtggctaacttaattttggactcttcatgaaactaccctgaaggtaataaaaccaaaaaaagaaaacagttgccatggatttgactccaactcatagtgattctacaggacacagcagaactgttccattgggtttccaaggctgtaatcttcatggaaacagactgccacatctttctcctgtgcagcagccggggcttcaaactgccaaactgcaggttagcagccgagcacttaaccactgcaccaccagggttcctttgaaggcagtagctcctcccttaattccaaaagtcattatccctattgtaacaatttagtccttcatgataatccatcccgtattggactgtctcattcttcaattccttattcttgtctagatcttcatcacatacagcatggtatatacagttgtccctcactatctgcaggggattggttccaggacacccacgtataccaaaatccacaggtgctcaagccccttctacaaaatgggataatattggcacataacctacgaacacatgcttgtgtacttgaaatcatctctagattacttataatacctaatacaacataaatgccgtgtaaatagttgctgtactgtattgcttcccccacgtgtctgtcagtttgtcgtagtgtgggggcttgcatgttgctgtgatgatggaagctatgccacaggtattcagataccagcagggtcacccatggtggacaggtttcagctgagcttccagactaagacagacaaggaagaaggactcagcactctactttggaaaaccattagccagtgaaaaccttatgaatagcagcagaacactgtctgatacagtgctggaagatgagccccccagattggaaggcactcaaaagatgactggggaagagctgcctcctcaaagtagagtcggccttaatgacgtagatggaataaagcttttaggaccttcatttgctgatatggcatgactcaaaatgagaagaaacagtggcaaaaatccattaataatcggaacctggaatgtacaaagtatgaatctaagaaaattggaaattgtcaataatgaaatggaatgcataaacattgatatcctaggcattagtgagctgaaatagactggtattcgccattttgaactggacaatcatatagtctactatgctgggaatgacagcttggagaggaatggtgttgcattcatcgtcaaaaagaacgtttcaagatctatcctgaagtacaaccctgtcagtgataggataatagccatacgcctacaaggaagaacagttaatactattgttcaaccttacgcaccaaccactagggccaaagataaagaaaaagaagatttttatcagctgctgtagtctgaaattgatcgaacatgcaatcaacatgcattgataattactggcgaccggactgcgaaagttggaagcaaagaaggatcagtagttggaaaatatggccttggtgatagaaacaatgctggagatcaaatgatagaattttgcaagacccatgacatcttcactgcaaataccttctttcaccaacgtaaacggcgactatacacacggacctctcctgatagaacacacagaaatcaaattgactacatctacggaaagagatgatggaaaagctcaatatcatcagtcagaacaaggccagaggccgactgtggaacagaccatcaattgctcatatgcaagttcaagataaaactgaagaaaatcagagcaagtccacgagagccaaaatatgaccttgagtatatcccacctgaatttagagaccatctcaagaacagatttgacacattgaacactagtgatcgaagaccagacaagttgtggaatgagatcaaggacatcatacatgaagaaagcaagaggtcattgaaatgacaggaaagaaagaaaagaccaagatggatgtcagaggagactctgaaacttgttcttgagtgtcgagcagctaaagcaaaagggagaattgatgaagtaaaagaactgaacagaagatttcaaagggcagctcgagaagacaaagtattataatgacatgtgaaaagagctggagatggaaaaccaaaagggaagaacatgcttggcgtttcccaagctgaaagaactgaagaaaaaattcaagcctcgagttgcaatagagaaggattctatggggaaaatattaaatgacgcaggaagcatcaaaagaagacggaaagaatacacacagtcattataccaaaaagaattagtcgatattcaaccatttcaagaggtggcatatgatcagtaaccgatggtactgaaggaaaaagtccaagctgctctgaaggcactggcgaaaaacaaagctccaggaattgatggaatatcaactgaaatgttccaacaaacagatgcagctctggaggtgctcactcatctatgccaagaaatatggaagacagtttcctggccaacttgaagagatccatatttatccctattcccaagaaaggtgatccaaccaaatgtggaaattatacaacaatatcattaatatcacatgcaagcaaaattttgctgaagatcattcaaaaacagctgcagcagtatatcgccaggaaacgtccagaaattcaggccggtttcagacgaggacatggaaccatggatatcattgctgatgtcagatggatcctggctgaacgagaataccagaaggatgtttacctttcgttttattgactatgcaaaggataacattgcgaagaatgagaatttcagaacacttaattgtgctcatgaggaacctttacatagatcaagaggcagttgttcggacagaacaaggggatactgattggtttaaagtcaggaaaagtgtgcatcagggttgtattcttttactataccgcttcaatctgtatgctgagcaaataatacgagaagctggactatatgaagaaggacggggcatcaggattggaggaaggctcattaacaacctgcgttatgcagacgacacaacctttcttgctgaaagtgaagaggacttgaagcacttactaacgaagatcaaagaccacagccttcagtatggattacatctcaacataaagaaaacaaaaatcctcacaactagactagtgagcaacatcgtgataaatggagaaaagactgaagttgtcaaggatttcattttacttggatccacaatcaacacccatggaaacagcagtcaagaaatcaagagacacattgcattgggtaaatctgctgcaaaggacctctttaaagtgttgaagagcaaagatgtcaccttgaagactaaggtgcgcctgaaccaagccatggtattttcaatcacatcatatgcatgtgaaagctggacaatgaataaggaagaccgaagaattggtgcctttgaattgtggtgttggcaaagaatactgaatataccatggactgccaaaagaacaaacaaatctgtcttagcagtacaaccagaatgctccttcgaagcaaggatggcgagactgcatcttatatactttggacatgtcaggagggatcagtccctggagaaggagatcatgcctggtggagtacagggtcagcagaaaagaggaagaccctcaacgaggtggattgacacagtggcagcaacaacgagctcaagcataacaacgattgtgaggatggctcaggaccaggcggtgtttcgttctgttgtgcatagggtcgctatgagtcagaactgactccatggcacctaacaacaacaacaacaatctttctggacgcagatcactaggtttgtcttctgtggagcagctggatgggttcaaaccgctaacctttcaattagcagccaagtgctgaactgttacaccgccagggctccttataataatcatttaataatatttattgattcataaattctaaaattgcctttaaaaaaattaagggctgggtgaaaaaaaaaacttatttgcttctcgtaaatgctaagccttaaagtattcatctatgttgccctttatttttagtgaaggtttgtgcccattatatatcaaatgctaaataacattaggtgtgggaattgtgctaaatatggccaagttagttcaagactctatgggcttattttattcaatccaacaaacatttattaaatgcgtattattgctgacaagcagaaaatttttctcttggattttcttacaggcacaatatgtgtgtgcacatttgttaatatcatagctttttagaagaaagatcttctttcaaacaattttgttggaaaataaacgttttaccaatcgcacttagaaacgtatggcaccaacattgaagaatattgggtatgacagttttactttgatcaaacgtgcaggcttttaagtatgaaacaatgagagaaaaagaggaaggttctctcatccatcaactctgccagattaatctggctacttacagggtgagcggtattacagcgagagaatcctccccttccagaatactgagtgctacaccatgagtaagttaaccctaaataaatgcataaccaactacattcgtcctaagacttcaatggaacaaagaaaaccattccaagacctgaacttcaagccacttaagatgaggaattatacttaacagccccaatttaaaatgccaaaagaatgatatgattgtaatgagtataattcattatagtgaatataatgataaatttttctttcataactacaaatatcacacacatagtcttcggtaaagggtacgttcagggggaaaaatcatatttgtatggaaggccctattgggaaaagtttattcaaaaggaaaagtgctatattgaaatagtcccagagaatacacccatcatgaccagatctacagaacaaaaaaacaaatagcataaccagcattccaagtattaccaggtacatacaccatcgaaggaaaagtcttcagtttcaacatatttcatagttgcttggccacgtatacattttcatggactagactgatcaatatatgaggctttcttcccttccattttcctgctgtccctaagatccactttgctgccaactctgatccttccttttttttttttttttttacttaaaagccatcatgagtctaaaacagtaaaattgaatggagatttcaaatatgggccaatttccctttcttacgagctatgaagaaaaacgtgcacacagtggtaagaaataaaaactctgcctatgacacacactagaataaagagacatcacttctctttggggaaaactgaagattcattaccaggcaacatattgggcagctttttgaatatcttataattttttttgtgacaagctcttcccccattgggcttcatcattcaggcttctcttcacactcctgttggattcaagactactcacgtgccttatgactaatccatcctcagcaaaccatgcggaccacctgaattcttgcctatgaaattgcaactaaatagaggaactataacaaccactgcaaagggaaaacaaaactagttccatgtccatgaatacaaagatgctcaagacaattatttcaaaaaaaaattttttttctcttcattaataaactgtagggaaattgaattttacattgaattagattaaaatttaaccaaccgtacttgggccctattctgggcatcacacttggggcattcttatatgctacctcattcagtgctcaaatccatcttaaaagattttatctttatttcttaggtaagaaaatggaaattcagagaagtcaatcatgctgctcaagtcataaagtcagtgaacagcaatgctaagacctgaactcacgttttcagtagtaatagagaatagtactacatgaacatattgtcttctggaactttcaaacctatttgaatttgttggaaaaaaatgaaaatgaaggagaagaaaaagagagatggtcctcagaagaagaaagagttcgatcaaaagaatacagctttggttcccactctcaccaaatcttctatttgtgcccgtgtattaggcaactctgcagtggagatactcaacagcattttaagaagaataggacaaagagtatacaactgaagtgccgtagagaaaggtacaaaagcacagcctgaaacatgaagactcagcatcattgtgaagaaataaccacttctatatccttcaaatgagctactcaataattgtgaaaacaaccaaagcaaacctttccgggggaaatccatgaatcattctgctcctctctgcagtggtacttaggtgtgtgatttggttgatgggttgatctaactttaatagcagggctatagatttaaaaatatatttcaaagatagtgtacatttaattttatttctggtgagattaatgcattgcaaagttgagttaaccaaaacgctctgtgaaataatgttcctggtgaatcaatctttatagtttatttgcttacaaagtttacgtagaaatctttataaagccaaagaagattctgtagaaagcacccataaatggctcccctacaagaaaaaaatagcgggactatattatcagcatagttacgtctaaggaatctctgggtgatgcaaacagttaagtggttgactactagctgaaaggttggcagtttgaaatgatccagaggtacctcgaaagaactgcctggagatcaacttccagaaggtcacagtctagaaaatccggcaattctcctccacacacatggggtcaacccattttaagtttgtaattttaggcagtttcagaacattaatggtgggactgtttccaaagcagacacactgaatggctgcctttaagaatatcatgaacgtaagaaattacaacttatcacataatagaaaaaaaaactgctcaaaggtagaattgtgtcagatgttgtgtgttaactcgtctctttgccacatgtgttacacttgaaagtttgaacagcaagtttaaaataaaacattctatgactgacagtgttaaaaaaaagtcaggatagactcaacagcgactaataataacaacaaaaatttgtatctaaagaacagagtaagatttgaatacattacacatactcttgtcggcccaatcttgcctagctgctctcctgccttctacttcactaggacagacaggcgaggcccagctcctgtgaaaggcactggacggacacaatattccaggcaagcaaggcaagattaatgcagtccacacaagagagagatgagactgactgagggtgaattaactgcagcaggaagaggctaggatgccagagatgttacccagagtcactcccatctttagggatgatatggagatgtgattctgaatgtcaaacttgggatttataatcaataattctattgtcagataatttatgacaaatgtgtttattcagctggcattgacagggcactcaatttattatctcctgagccatctgaagttatatatatgctgccagcatgcatttatatgtgccaaatctatctgccgtttctctttttctggtaggaagagttcacacagcttaccaaaaagggcctgaccagatcataaatcaagggaagcaatttctgataactgaatatgagtctcctctaaagcttttatgggacgaaatgccaagaagctctgtgactagcacacagaaaaacccatcacacttcttttcctcccatcagttgctggcctatttgttctagaatgcacaaccataatctataggctcttctcagcactttcattcgcatttgcccttatatccggggaggcctctgctagcagcttaactttctctctaggcattgctcccttcacatccactattagctgagcaaagtgagttactactgactttgactcttctgcccaatgtacattttcaatttgtttgaaagcaggaaaacttaagatacctaacatatattttgtgaagggaaactgctgacatttgagaatgaggaaaaaacttttaagatctgctatatggcagggtccctggggggtcaaaatgggttgtgctcaactatgaacctgaaggttggcagttcaaatccacctagtggcttggtggaagaaaggcgtggtgatctgcttccttaaagattacagccaagaaacccatatgggacaattctactctgtaacttaggaagttagaactgactccatagcaatgggttatatgacagacttcaaataggggaactagaaatatccaggcaacccctctttctttcaagatctggccatggtcactgcaaaccatggaaacaaccctttcaaggtagccgactccacaaaaatctacccagccttagagactcgcgagtcaagatccccactccatttctctccccactgagaggctaagggaagggagagaagggaagatgctgacttcgacagatgacgcccaggctcacgaagtctttgtcttagcacggatttcattgctagctataaaatggtaagtatgtcatcagggaaccaaactggatgtaaacaaatttgcaatgctttatcaagttggctttcaaggtttttcccccagaaacaatagtaattacaactgggagatgaagctttaagtacactaatattttaagtgtagtgctttgttttattacggctttgcctatgagaagaaatctttctaaacggggcttctaacaatataaaagcacatatgtcccaaaaagaatgccgaactgaaaaccaaatttgcttctaagcagataatgcccctttcacgtgattatacaactgaaaaaacagattaagaaaaactgttgaacagtttcccttttactgcagcaaaaccatttcaaataaaagataaattcacaggactattacaaacactgtaaaaagcctgagaaagcttggtaagtaaggaagttttaaattactgctcacataaaaataaatgttactgtccatcacagctctggctaggatatgctttgcataagaaatactttgagatgctagaaggcaaaaagtcaacaacgattattctacaccaaagtccctattgtttacaaaagagagtagttagtttgccttctgattggcctctcagagcaaagctccttagaaaccactccatatcatttggttttcattccaaattctaccagaatttaaaaggttattaaagtaaatggatcagtccatcggaggatatgctggcacaagcattctcctcagcatcagactaaaatacaagtcattggagcggctttgaaagcggtacctttactgagtagcagcaatcaaactggattaaaatgatcagtaccatcaatagtcatctagccttctacttgtttgaagtgttgaaagcttacaagttcttatcagaagaactttctcttgtttgtagccaccagcataaactgaaaagaaacatctcataaattacaatctcagagtcttaactttttaaaagctgaaatggttaaaagaaaagaaaaaagctgtgacaaaggccatctctgtatttttcttctttgatagagattgtcctctctataagtttgtttgccataaggagggatacgcgaaggtaattcagagggagggtaggatggctgaagacagttggtggagagccggcgagacttgactcagtccattaactagacatgtaactgtggtcaagtcattaagagatcaggatcccaaaaagcatagtacagtcttgtttagtctttcacttgcactctgatgaaaatgtgagataatgcatgtctgtttggtagaaaattgcatatagcaacataatatacaatttatgtaaatactatagtttgatttcttttccactcatcttaatgtaaactgataactcaattcacctttaatgaaaccctgctggcatagtggttaagtgctacggctgctaaccaagaggtcggtagttcaaatccaccaggtctccttggaaactctatgggacagttctcctctgacctttagggtcgctatgagtcggaatcgactcgaggtcagtgggtttggttttggttttggatataaaatgtatgtgtgtgtgtgtacatacttaaacatgtgtacatttcctttatatactttattaagataattagaacctaaggaagcataagtaatgatgataaaatttactaggaacaaaacaagagaaatgtggatctttagtacaccaatacagtgaaagacaaattaaaggcttcctctagaagctattttaaaattatgattcatgttagaagaattcacaattgaaatatccttgtgccttcatttttttttctgtcttcaagaagcattcctctttcttatcattcagaaacctgtcctcttttttttttttccctttgaatgtttcttacaattccacaattaaatttaaatccatcacaaatgctgtaaactaagttctctggataaatcagaatcgtaagttagatattgtcaatggaaatcattaaagagtgtccaccaaagcagagaaattacacctgttgccaagtcttctgcacccatcccttcctccttccctctctctctgtcacacacacacactcacagatgaaaattcctgcaaacatgggatgctgagtgctatatgatcctttatgctgaataagaacaaactcatttcccgtgcaattaaaagaaaaagctgtccaccttttcacatacaaaattctgtttttcattaagtctggtctcagatacactaggatagtcagtctgcaaatttttctttcaatggttgggtgggagtgggaagcagcagggtgggaaaaggaaatattaaaatcagagctaacctctgccacgtaagaattctccttggtatgaaatgccctctggaatctagatttttccagagagattagctcaatttaggtacagcagtttcaagttttaactttaagccatcttttgttacctcattcaagggttttcctgagacccagacactattcatcaagatatctattaccttctcacatttttgggtaaatctttgaaacatggtgtctcattccaatgaatgatataaaagaaaagaagacaaaaatttgagcagagtggagcaaattcagtgccattttgcaagtacgggtcttccccgtgtggcattatcatcttactacaagggttagaagttccccttctataatctgggattttatgagctttcatgtaagttccacttctatattttcaacagcctcaagatgtcccaaccaaccaagatattttaatacttattaaactatgtttaaaacaaacaaaaaaacaccatttctcaataggaaactaaaattaggattatttaggcttgaggtttgctggaaccaagcctcttaggccagagaagaacaaaaagaatccaggattatgtgaaaatgagaacatgtacaagtgactggattatagagctggcctttgaaggggtagccagaagtccaatgtacaatattcagaggggctggaaaatctggtttggttctaggaaatagctggtatctgagaggatccagtatggaaggtgggaggtctaagtaccatactcaaagtcaagcacgaagtggtatattcattcaaagtcaaatgcctcccagcatctgggggtttacgggtaagttccagcccagagaagaggctgagttaggtaggttgtgagggtccaagagggctaggctgtgtcacaggatatcattttgggctctgttcactgaatggttattgcaaatttgttacctaggaaacagactgtgagctggagatttgtgagcaggaaatttatgggggtggggggtggggggtgggggggcagtattggactcaaaagcaaccaaagcaaatccaccaacaacggtacaaggaggaaattgcaggctctactgtgatactcccaactttttattcttctttgtcatgcattaatagtaattacaaggctggggtgtaaaaccttattatctgtctgtagctgggatgggtagccccttaagcaaataatagcaatcagttccttaatttttatgatttcatcaactgcataagaaggaggatgttcttgagggagtgagacaaaagatttcagtaaggcaacaagaggaaaatgtgcagagcacagaatgtggcccacatgaatatacccaaccctcagcccgctgctatcaggtcaactctagcgaccccatagggcttccaaggaatggctggtggattcgaactgcccaccttttggttttatcgtttttagtggccatctctgagcagctgtggaacaaagcagaattggtatctgaaaagggtttgaagatattcaaaagatggaaagaatttaggaattgagcttataaaggtactaccataatagcaataatcacaaaatttatttcccagttcttgaattttaagttactttctactaaggctggaagaaatctaaggcctctaattttcaacctctccattgaattctggctacctcacaatacagtgttggttccccaaacttgtactgcttactccttgggctaaaatttggtgccacagaatctctgtttacattcattaacccactgagtaagcaaaagcaagctataatccagaatcagagaattcctgactgccaacttagaatgcaatgggttgaagagcgccttgcttcacatttagatgtacctgaaactgcctctctaggcctggtacatcactggccagttaaagatcttctagttgaaccctagggcaacagtctttcctggctgtatgcattctgagatctttaactataaatgtagttagtttcaggcatcttggcataatggataatttaccaaagaagaagcaaaccttgtgttgccgtgcaggctctcctgtgtagcctactgtttccaactttaaccaggcagcaatgacttcaatgggacaaatggtcctcaagatatgatttaactctcccctaatgttgttctgggctcctcgggcccagtggtcgagttattgctctaatgtcccctacagccatcagggaacctatctacgggacaactgactagagggagccccttgctaagttttgcttgggcttctgaaattgtgcttccaggcattgctgtttcctctacttccctttctgtgtgctctgggagtacactcaagccatggccatcttattactattcttatgactacagcaatataagtgacataagacaaaagatcatccaaagatagtgaggatttttattttaacatatacggtttctgaccagcaggatagggggaaaggggggccttaacagccctatcctgttgtcagatggggctaccagagccttacccgttgccctcgacacgattccaactcatagcgactttataggacagaatagaactgtcccatagggtttccgaggctgtaaccttcacagaagcacacggccacatctttctcccacagagcagttggtgggtttgaaccaccaacctttcgattagcagccaagcacataaccactgcaccacctggtctccttaccaaagccttggggttctgtatatccaagtgagctctggcctctgatgagcctataaaaagattcagtctgccctacattccacctttcacagcaggcttctacctcagttgccagctgagtacttgtagtggatgctatgatgcgctacctagatcctttccctttgggacttcttctttcttccagctgcgggagtctttagttcaattaaatacatcagtatcatgtaatttttttcttgaaaaagtgccatcgttattataaataagtcctactaaaagagatttttatgtttaaaaaattccaacagcttgagtcattctaaattattagtttcttaattattgcacatgaaatgccatgtaaaattcactgacaaatatgtattgagagactgtgtgtcaggactgtttggtggctcataccaccaaacaagaaaggtccctgcctacagcagcttatgatcagaaaaatcccaatagtaagacaatatagaaatggtatttcaaatgaaattttttgcttgtggaaaaaaaatagatatgctgtaaaaaagttaaactatcaagtcattttcaagaaccatcatgtttgtggcatttgaagaaacattacaaaaactgacgatgagaatagaaagtagccctcaacatacttatttaaagatgcacttggagatttcaaatacagctaggatgaaataagcatgctctatttaccccactgattacaacagcaacaaaaataacctggacaggattcttatagtaactgttcaaaggatgctgaagactgaaatataacaggtagatcaggcaaggaaataaaaactcaaagaatgactcataaaggcagtggattttcttgcttgttcatttgttccttccatataccctagctcagacttgaggaagcctgaatcctaaaactgtggagcaggaaggtacagaaaaagaaagctccaagagaaaatataactttctgggccacaggacaaggaaaggagggcctctgttgaatagacactgtgtgaggaaatccatctttttccctctctctctttctactttttacactgtctgctctgtatcgagttaaaccctagtcatgaagctgtacttacatagtggtagcaaacatgcaggtatctaaactgagagaaaatcctactctctaactagaggaagatgggtccctgtggtcagaacagtaggaaaagaatccccactattttttctcttgctactttgtgacaaacacagacccattcatgggaagcacacaatagtgcaaggagattaaaaccctggttttgtagccagaatcaagaaaagtgacccctgagagccagaaagcatggggaaatcacggaagttggagagaaaatctgggtataaagttctgggcttactctcataaaatgacctgaagcaatatagcaagtgctttgagaactgacctgaagtacagagcactgcccatgtcccaggtagcgggttggcacacatgctggtcagggctgaacttgcaaagactctgaaaaataaactggcattggaaccacaactcacagaagtaaagtcaggactcatgttctaagcctaaccaggttgactgcttggtaaacaaaaagaatcaacatttatcaaagcattttaacagagcccaaaatcataacacagtactaaaaatgtccagaatacagtccaaaattaggatacaaaaaacaggaaaatctcaacaactctcaaaaaaaaaaaaatccaacagacaccatttccaagttgacgcagacattagaattatcagccaaagactttaaagcatgttatgcttttatgttcaatgatgtacagaccaactctcctgaaataaatgggcagatgcaacttctccatgaagaagtagaaactattaaaaaaaaaaaaaaataccgaatgagaatttcagaaataaaaaatacaacaaatgaaattgaaacattcattgtatggggtcaagagcagaacagaaatggcagaaaaaaagtcagtgaacatgaagattgattggtagaaattatccaatctgaacaacagggaacaaaaacgacatagcttcagagacctatggcgtaatatccaaagctctaacattcctgtcattgaagtcctagaacaggagaaagaaattggagcagaaaaagtatttgaagaaatatactagctcaaaacttcccaaatttgatgaaagaaataaattgacaggtttcagaagctcaataaacaccaaagagtaaaaacacaaagaaaatccaaatatagacaaatcatattcaaactcctgaacatcaaagataaaatcttgaaagcaccagaggaaaacaacacattacatatttgaatgatttgacaatttaagtaactacagatttctagtcagaaaccatgggggtcagaagacagcggaatagtatttttgaagtgcttaaagaacgtaactgtcaacccaaaattctttagtgaaaatacccctcaaaaatgaagatgaaataaagacattctcagatcaaggaaaaaaaaaaaatcattggttgcatacctgcttcaaaagaaatgctataggaagttcttagggcagaagggagatggtgccagaggaatatctggaacttcaggaatgaagaaagagcaaaagaaatggtaaacatctgggtacatacaatatttttttctctttaagctctttaagacatgcactactgtaaaaccaaaaaaccaaacccagtgccatcgagtcgattccgacccacaacgaccctataggacagagtagaactgccccatagagtttccaaggagcgcctggcagatttgaactgctgaccctttggttagcagccgtagcactaaaccactacgccaccaggctttcctgcactactgtagaaagtgaaaaatataatactgtccgataggcttttcaatgaaagtaggtgtaacacttatgacaactatcatgtaatggggagaggaaaagcaacctacatggttgtaagatttctatatcttatttaaagttctaaaatattaactttaagtaggctatgggtgagtttaaattgtcaaatactccaagagaaggtaggaaaagagaaagagaggggaatagaacagaaaactaaggagaaggaacaaacagaaaaccaataataaaacggtagaactaaacacaaacatgtcaataattacattaaaataaatggtcaaaacataatatttaaagatagggacagtcatatcaaaaaacaaaaacaagactcaactgtaagttatctacaggagcccactttaaatataatggtaccaaaaattaaaagtaaaatgaggaaaaaagatacactacgcatacactcatcaaaagaaaggtgggcaaagtaaacttcaagcaaggagaactgtcaacgatacagagggacattacatgatgttataaagtatcaattcatcaaaaagttataacatttctaaatgtatatgcacttaacaacaaaattaaaaaaaaaacatgaagcaaaaattgatagaaaagagaaataaatccacaattatagttggagactgcaatacttctatctcagtaactgacagaacaaggaaaagaaaatcatcaaggcagagaagacttgaacaatactatcaactagttggatctatgtggtatttatataacagtctactcaatgaagacaaatacaccttcattttgaatgcacacggaatattcaccaagatagctatgcccttgtgtcttagtcacctagtgctgctataacagaaataccacaagcagatggctttaacaaagagaaatttattctctcacagtctagtaggttacaagtccaaattcagggtgtcagctccatgggacagctttctctctctgtcagctctggaggaagattccttctcattaatcttcccctggttgaggagcttctcaggagcagggaccccaggttcaaaggatgtgctctgttccaagcactaccttcttggtgctgtgaggtccccagctctctgcttgcttccctttcctttttgtcttttgagagataaaaggcggtgcaggcccccgtcccctccagggaaactccctttacactggatcagggatatgacctgggtaagggtggtgttacaatcccaccctaattctcttaacataaaattacaatcacaaaatggaagatgacaccacaatgctggaaatcatggcccagccaaattgatacacacatttttgggtagacataagtcaatccatgacacctggattataaaataatcctcaacaaatttaaaaggattgaaatacaaagaatattttctgactataacaaaattaaactagaaatcagtaacagaaagataaaatcaccaaatatttggaaaataaacaacacacttctaaataatccacgggtgaaagagagagtctcaatgaatattagaaaatatattgttttgaataacagtaagaataaaacatatcaaaatttgtgagatggagttacagaaattcttacagagaaatatacagcattaaatgcttataacaggataaaagttcccagataaatcatcttagcttccatgataggaaactagaaaaaaaactaaactcaaagaaaactgaaggaatcaaataaagaagataagaggcaaaatcaacaaaatagaaaaacaataaggaaaagcaaagtaaccaaaagatggttcttcaaaaagatcaataaaattgatcaccctctagcctgaatggccaagaaaaagaggtaatgtgcaatttaacaaggtcagaaacaaaagagggactatcattacagatttcatagatgttaaaagaactgtaaaggaatactgtagacatctctatgccaataaattttacaattagatgaatcaattctttgaatgacacagactaccacaattcactcaaaagaaaagtataacctcaatagtcatatattcataaagtaattatagttaaaaaccttccaatgaagacaaactcctggcccacatgatttcactggtgaattatacaaagcacgcaagaaatgaaactaataccatttctatacaatctcttccagacaacagaagagagagcatttcctaattcattttacaagggcagcattaccctaataccaaaaccagacaagacataacaagaaaagaaatcatgaaagaacatccctctagaacacacatataaaaaccctcactcagcaagatcttagtaaaagagtccttcgatatataaaaaggatactaatatcacaagcatgtggagtttatcccagaaaggcagggctggcacaacattctaagtaatttatcattttaacaattaaagagaaaaaaaaaaacaaatgaacgtatgattgtctcagtaaacgcagagaatacatttgacaaaattcaactctcattcatgataaaagcatagtaaattaagaatatagcggaacttccttaacctgacagaagacgtctaaaaaaatctattgctatcatatttaatgatataaaactgaatactttcctcctaagtttggaaacaagacaaaaaacatgcactcttatcactcctattcaatatcatactggaagtcatagccagagaaataaatcaaaagaaaaataaataaaaggcatccagattggaaagaaataaataaaactacctctatttgcagataacatgattgtctatatagaaaattccaaaaaaatctataaataaaattccttgggaccaataaattaatctagtgaggctacaggatataagaacaatacataaaaatcagctgtgtttccatatattagcaaagaactggaaagtaacatttaaagaacagtatcatttacagtaagatccccagacgatacaaatggtttgtgctcagctactaattaaaaggttggcaatttcatctcacctagtggcttcagagaagaaaggtcaggcaatctgcttccatcaagattaaaatcattgctgtcaagttgattccaactcatagcgaccattatggactgaatagtgtctgccaaaaatgtgtgtcaacgcagctaggccatgattcccagtattgtgtaattgtccacaattttgtcatctgatatgatttttctttgtgttgtaaatcccacttttatgatgttaatgaaacaggattagaggcatttatgttaatgaggtaggactcaatctacaagattaggttaagtcaatctcttttgagatataaaagagagaagggagcagagagacagtggggacccctcatacaaccaagaaagcagcgccaggagaagagtgtgtcctttggatccggggtccctgcatggaaaagatcctagaccaggggaagattgatgacaaggaccttcctctaaagccgacagagagagaaagccttcccctgaagctgataccctgaatttggactttctagcctactagactgtgagagaataaatttctctttgttaaaaccatccacttatggtatttgttatagcagcactagataaccaagacagggaccctgtaatatggagcagaacttcctcacaggatttccaaggcattaatatttacggaagcaaactgccacatttttctcccgcagagaggctggtaggttcaaaccgctgacctttcagttagcctgtgagcgctttaacactgtgccaccttggttcctttccataaagattatagcccagaaaaccctggatggagctcagttctactgtgtaacacagggtcaccacgagtaaaaatcaactcaagggtaaggggttgttttttgtcgctagtttttttctatcatttacagtagctgcaaaaagtaaacactcaggtatatatctaacaaagtatgtgcaggacctgttgctggaaaactgtaaaaggaaataaaagaagacctaaatgaacagcgagatatacaatgttcttggattagaatgctcaattttgttaagatgttgattctttctaaattactaatatagcaacattcagtttgttaagatgttgattctttcctaatggctaatatataagcaggattttctgtagttatcaacaagctgattgtttgatctacatggaaagacaaaggaaccaggatagccagaactatttttgaaaacgaatagaagtagtcctggggttatgaatgagatctgttcctaaatgtgtctttaagaatttgtaggtaagtgggaacagttgcttacggttcttgtttagccttactttagggcaagaggagccctggtggtgcagtggttaagagcttggctgctaactgaacaagctggcaattcaaattctccagccactcctcggaatccctacggggcagttctactctgttctatagggctgtcatgagttggatcaacgtgatggcaccaggtttggtttggttttagttaatgcaagaaaaggctggaaggcttttcagtgactgaaaagctgcacacgcagcaagtgaaggtgatggtgatgaagaaattgttgtgagtagtaggggttggttcgatcttctgaagtgagggcaaatttacataacattaaagggcaagtacaaggggttcataagttggaagtctgtaacccagggacttattgtaatgctacagaacttacactacctgattttaagagttatcataatgccacaataaataacacagtgtgattggcaataggataaaagaaaaaaagagccaaactcactgccatcgagtcaattctaactcatagcaaaccctataggacagagtagaactgccctatagggtggtttccaaggctgtaaatctttatagaagcagacagccacatctttcccccatggagtggctgatggattcgaaccactgaccttttggtttgcagctgagcattttagccaccgtgcaaccagggttcccagcaacaggatagacacagattaataatagagagtcaagaaatagatttatacatacaactgactataaaggagtttttttgactataatggattttttggggcgggagagtgaaggattttttcggtatcctgatattggtatttatacaactctatgtatttgtcaatatgcacagaactgtacacacgaaataagtacattataaaataaaaattaaatttaattaaaaattaaaaaaactaaaagcttagtgctttgcttccttaatttacttctctgtactgtacatgccatgtaatccaaagcataaacattttaagtggctttttatctaatcacatgatgattaatcctacataattgaaaaggaagatgttgactgaaaattcaaagttcaagttcaatattgctgctctattctacatgaatactgtctcaactagaacagtattcaactgcttgtaacagagtgcagtgtaatggattgcttttatatggcctttctcgccatggtcatgtttaactcccactcaagtgattttttttttttttttttttttttcaagtgattgggaggcactatacaaataaggtaactgtggcccaccaaggggactggataacttgctaataatgcaaataaagtttatggcactcatgtgtgggtaggaccatgcaaataaggtctacagaaagctaacgcaggtattggtcagttttgccatcccattaggcttaaaatgagccatcccagagttgaaaggagaggatcccaccaccaccaaggaagaagagccaggaatggagtgtgtctttcagaccctgagctgagaagctcctggaaccaggtaaccaagaaagaaagagctgtaacaccgaagatggcgagaagcagtggcacagaaacagtggcagcagaaccaggagaccagcaggaggtagcccagcccactgagtgggaaagctgagtgccttcgggcaggaggcttgctggtggagtaaggtgcctccggaaacttgatggaactaggtttgccgaactctgcggagccagggctaagcgccttctggccaaggcttacttgtggagcggggtgcctctgtgcacttatcagctgggctaaaagagctttataacacttgtccaagccgggcagaggccaaggtgccagagagaagcctgcctgcaggcatggctgagaagaggctgtccttattgaagaagtgtgtcctgagtgttcctcaacctgaactgtaacctgctacttccctaataaggttcataatcatgagtgttgtctgcaagttctgtgtggccaatgcaatgaattagcagactcagcagagaagaagagactgccatcagagggatggctgtagtcgagactggtaaagatgacggagagaggaggcatgtgtaccctctacctcgtaggaatcagccttgggctattgatcttaattctctgtcctccttgtgaagttagagaatattagaagcctccaccacaccatttttacatagactcaaattaacagtggcttacgcaagttatgagattattttgtgcttccctaaaagatgtctaaatgtaggtagtcctaagctacatgaactacctggataacagtgggtgcatgatatcattagtgtccaaggtttacactacctgtctgctctgtaatgcttagagtataacactttccctcctcaaggtcactcatggtaacaggatggctgctggggctccagccatcaggtccacatgtcaggaaacagaagaagaagggaagtggggaaagtaaaggggtgtctctcagctgagtaagccccattcaaaagcctttgtgacgtttcatgaacaaatcccaccctccatcccaccaatcactcctttctgaaaaggagtctgggaaatacacagttttttgaaagctgcactcattgtcgtgctcaaaaacatacaggtccttttaatacagagaaggaaggggaggatgacgtctgtatttggtagaacactagcagtctaattaataagacaactagacacacatttgctatttgctgtttggagaaactgattttggaaaagcaattccaatcagtgaaaatcaatgtgaaaattaatagcagtgaatttcattcaagtatttataaaactagagctatatatgtaatgcttctaaaagacagtatgatacatcagtactgctgtatacatacagttgatatatactaacaggtactccatacctcaaaattattgaatcaccctatcctgagggtttcaagattaatatgtttaagtccaactggaattaacctatccctcttaatgaatgcttctgctcttccttgttggacaagaaaaggagaagcacaaggaagagggctttcaggctaaacctcacttcaccatgtgaggattcttgctgaccctgttctagaagattggatctgggcagtcatgaaaggtcatttcacaacttcacacatttcagatggcgactactctcttcagaaagaatctctttctggtcaaagctagaaaaagaaccttctcgttacttactgctaacagtaaccagccctgatgatgggacaagatgctttcttgtgtacctggaaatgcagtggtgcagaaaactcaatgggaggcgaagtcggacggaggaaagctctgtccgagactcagctttgccactaaccagttagcaaaacttgaacaaaacatttctttttagcttctgctactctggaaaagcattttcacgttctaaaagaattctcaatttctatatctacctagttcctaggtcatgcaaacaattaaacatctggctactaactaagaggttggtggttcgcatccacccagaggtgcctcagaaggaaggtctggccatctacttccagaagatcacagccattgaaatccctacggagtacagttctactatgaaacacgtggagtcaccatgcatcgagatcgacgcactggcttttacagacttagataagcgcctagtgctggcgttaaggtatcgaaatttttgttttgatttgggttttgttgttgttttcttttctttttttgtttaaataaagactagagtatatggacttgtccaatagtcagaaacagaacataaacccaggtgtcctgacttctaggacaatgaacactttccatcacaccaacagtatgattcttttgtgtctgagaaacgcataatcttcagctaagagcctaaactgctgtgcagaaaagggaagactgaaaagcacggccagaggccaacgtactggtcgagctctgtgaccaactagctacagaacctaggctcgggctccccagctgtaaaatgagagagctctcctagattagagagagctctgactcccacatgaatacgagcctgaactttgtcaggtattttatcccaccgcagcaggaaatgtcccttggatcacactttgagaaatgtgatcagggcttcccaacttttcaactcatgacacacatgaaaaatgaaaatatgagtaggaaaaaatactttatcctgttgttgttagttgttgtcaagtcaggtctaactcatggtgatcttatgtacaactaaacaaaacatcgccaagtcctgcaccaacttaataattgtttatgtgtgagcccattgttctggttattggcgtttgtgtcaatccatctcactgagggttttgctcatattcaaaaaaaaacaacccagtgccatcgagtcgattccgactcatagcgaccatatgcactggccctctattttaccaaacatgatgtcctttttctacagactggtctttcctgatgacatgtccaaagtaagcaagtcaaaggctcaccatcctcatttctaaagaacattctgacaaaatgccccacactggcataaatagaagtggatgtttaaagttagaggtgaacccactgggtgtgctgaggaccaaggggaccagtgtctcagcacacctgtaattccaactgcagcacacgagttggggagctggaacctaagtgtaagttgcagcttttactacattaggcagcactctgaaatctgctgcttctaggtagggcagtgctcccaggacctctgctgctggatggtgagctggggaggggcagggatggcttggggtgaaggtgacaattctcagagctgaggaagtacaacacagtgtgagaagcacacagaaaagccccctctcctcaccaggacaaagggaggaggcgaggaagcctctcagctgctcactgctcccatttaggtctctggctgccctgtgaagcttctcttccactgagtagccttgcagttcacttcaacctggttttacctgggtaaagactttggtagatgaagggctacaggctatatgggtctttcttggccccaagagacaaacccggtctagttcagtcagcatttacagacttagataaacaccctgtgtgggtgttaagacattgaaatgccaggataaacagcacgcagcacgcttttcttgctttatatgagatggaaagtgtggaataacaatctggatgcaagagacaagggtcctaataactaggaagttcagatcgctggattacttcttttttctttccctggactaagcaagattttagaagaaaacaggcatataacaaaaactcactgacatcagggatttattcagcagagccatttccagaggctatcctggaatcatttcacattcagctcaatagtctatatcttccacacctttatcttttgttctatacaatgataactgatggtcagcattacagccctcaggtcctgcaacccacggaatcatcaaagggagattcaattatattcgtaacaccaaatgtatctgagcagcaaaggtgacatggagactgtgaagggatgaaacaaagagttttctggttaactcttagtaagtcaaaagtaaaagaagattcaattctgcacaaaactctggttgacggagaaagctcttaatatctgaatatatcgagatgaacgttcccaatcctgaagccaactcagcactaattttacaccacctgtctgtcagtttgtcttactgtggtggcttgtgtgttcctgtgatgctggaagctataccaccagtatttcaaatatcagcaaggtcacctgtggtagacaagcttcagtggcatgtccagactaagacagactaggaggaaaggcctggcactctacttctgaaaaattagcccatgaaaaccttatgggtcacaacagaacactgtccaacgtcatcaggaaggatcaatcacagaggaacacgccatgtttggtgaagcagagggccagcgagggtgagatggattaacatgatagccacaacaattgactcaaatatgatggcagttgtgaagatgatgcaggatcaggcaaggtgggctttattgaatataaggtcgtcatgagaaggcacagactccgtggaagctaacggcaacacctttacccagcagtaagtcatcctaaacttcctttcacgggggccatcctttattgttagtaacttcgcataattaaaaatgtcattagctttatttttactctcacataaatgattcatggttactttagaaaacacaaaatgcagagcaaaacgatagggaaatcaccaagaattccaccaccaagagaaagtcattgttactattttggtgactatcattataatattcttgtatttctgtgtattgataccttttcaaatgtttaaaagttttatgtaaatacaatttttttaaataatttttattgtgctttaagtgaaagtttacaaatcaagtcactctctcacacaaaaacccatatacaccttgctatacacactcctaattactcttcccctaatgagacagcccgctctctccctccactctctcttttcatgccaatttcaccagcttctaaccccctctaccttctcatctcccctccaggcaggagatgccaacatagtctcaagtgtccacctgatccaagaatctcactcctcaccagcatccctctccatcccattgtccagtccaatccatgtctgaaaggttggattcgggattggttcctgtcctgggccaacaggaggtctgggggccatgaccataagggtccttctagtctcagtcagaccattaagtctggtcttatgagaatttggggtctgcatcctactgctctcctgctccctcaggggttctctgttctgttccctgtcagggcagtcatcagttgtggctgggcaccatatagttcttctggcctcaggatgatgtagtcactggttcatgtggccctttctgtctcttgggctcgtaatggccttgtatccttggtgttcttcatcctcctttgatccaggtgggttgaggaaaattgatgcatcttagatggctgcttgctagtgtttaagacctcagacaccactcttcaaagtgggatgcagaatgttttcttaatagcttttattatgccaatgacttagatgtcccctgaaaccatggtccccagacccctgcccctgctacgctggccttcaaagcattcagtttattcaggaaacttctttattttggtttagtccaattgtgttgacctcctctgtactgtgtgctgtctttcccttcacctaaagtacttcttatctattatctaattagtgaatgccgctctcccaccacccctccctccccctctcgtaaccacaaaagaatgttttcttctcagtttaaactatttctcaagttcttataatagtggtcttatgcaatatttgtccttttgcaactgactaatttcactgaacataatgccttccaggttcctccgtgttatgaaatgcttcacagattcttcactgttctttatctatgtgtagtattccattgtgtgaatataccatgatttatttatccgttcatccattgatggacaccttggttgcttccatctttttgctattgtaaacagtgctggcataagcatgggtgtgcatatatctgttcatgtaaaggctcttatttctctagcatatattccaaggagtgggattgctgaatggtatgatagttctgtttctagctttttaaggaagtgccaaaccgatttccaaagtggttgtaccatttcacattcccaccagcagtgtagaagtgttccaatctctccacagcctctccaacatttattattttgtgttttttggattaatgccagccttgttggagatgaaatctcattgtagttttgatctgcatttctctaatggctaatgatcgtgaacatttcctcatatacctgttagctacctgaatgtcttctttagtgaagtgtctattcatatcttttgcccgtgttttaattgggttatttgcctttttgcaattgagtttttgcagtattatgtagattttagagatcaggcgatgatcagaaatgtcatagctaaaaactttttcccagtctgtaggtctttttactcttttagtgaagtctttggataagcacaggtgtttgatttttaggagctccctaatttttcttctacattctttataatgttttgtatactttttctgccatgtattagggctcctaacgttgcctctattttttcttccatgatctttatcattttagattttatatttaggtctttgatccattttgagttagtttttttgcatggagtgaggtatgggtcttgtttcatttttttgcagatggatatccagttatgccagcaccatttgttaaaaagactgtcttttccccattgaactgtcttggggcctttatcaaatatcagctgctcatatgtggatggatttatgtctggattctcagttctgttccattggtccatgtatctgttgttgtaccagtaccaggctgttttgactactgtggcagtataatagcttctaaaatcaggtaaactaaggcctcccactttgttcttctttttcagtaatgccttatttatcaggggcctctttccctcccatgtgaagttggtgatttgtttctccatctcgttaaagaatgtggttggaatttggatcggaactgcattaaatgtatagatcgcttttggtagaatagacattttcacaatgttaagtcttcctatccccgagcaaggtatgttcttccacttaagtaagtctcttttggtttcttgcagaagtgtactgtagttttctttgtataagtcttttacatctctggtaagatttattcttaagtatttatcttctttggggcttctgtaaaaggcatcgatttggtgatttccacttcgatattgtttttgttggtgtagaggaatccaactgattttcatatgtttattttgtatcccgatactctgctgattagtttcagtagttttctggaggattccttagggttttctgtctataagatcatatctgcaaagagagatacttttacttcttccttgccaatctcaatgccctttatttctttatctagcctaattgctctggataggatttccagcacaatgctgaataacggtggtgataaagggcattcttgtctggttcccagtctcaatgggaatgctttcaggctctctccatttagggtgatgttggctgttggctttgtataaatgtcctgtattatgttgaggaattttccttctattcctattttgctgagagtatttatcatgaaggagtgttgaactttgtcaaatgacttttctgcatcaattgataaaatcctgtgattcttgtcttttgttttatttatgtggtagattacattaattgtttttctaatgttgaaccatccctgcatacctggtatgaatcccatttagtcatggtgaattatttttttgatatgttgttgaattctattggccaaaattttgttgaggagttttgcatctataggtctataattttcttttcttgtggtgtctttacctggttttggtatcagggatatagtggcttcatagaatgagtttggtagtattctgtccttttttatgttctgaaatacctttaatagtagtggtgttaactgttctctgaaagtttggtagaactctgcagtgaagccatccggaccagggcttttttttgttgggagtttttggattaccttttcaatctcttcttttgtgatggatctatttagttgttctaccactgtttgtgttagtttaggtaggtagtgtgtttctagtaattcatccatatcttctagattttcagatttgtttgagtgtagtttttcatagtaatctgatatgatccttttaaattcagttgggtctgttgtagtatcgcccatgtcatttcttattcaggttatttgcttcctctcctgtttttcttttgtctgtttggccagtggtttatcaattttgttgtttttttcaaaaaaacagcttttggtcttgttaattctttcaattgtttttctgttttctacttcatttagttcaggtctaatttttattatttgttttcttctggtgcctgtgggtttcttttgttgctctctttctatttgttcaagttgtagggataattctttgatttgggccctttcttctttttggatgtgtgcgcttattgatataaattagcctctgagctctgcttttgctgtgtcccaaaggttctgataggaagagttttcattcccattggattctctgaatttctttattccatccttaatgtcttctataatcccgtcttttttgagcagggtattgttcagcttccaagcgtttgatttcttttccctgctttttctgttattgatttctacttttatggccttatggtcagagaagatgctttgtaatatttcaatgttttggattctgctaaggcttgctttatgacctaataagtggtctattctagagaatattccacgtgcactagaaaagaaagtatacttaggtgctgttgggtggagtgttctgtatatgtctacgaacgaggtcaagttggttgactgtggcatttagatcttccgtgtctttattgagcttctttctggatgtcctgtcctttactgaaagtagtgtgttgaagtctcctgctattattgtggagctgtctatctcacttttcagtggcgatagagtttgttttatgtatcttgcagccctgttattgggtgcataaatatttaatatggttatatcttcttgaggtattgtccctttaatcattatatagtgtccttccttatcctttctgatagatttaactttaaagtctgttttgcaagaaattaatattgctactcctgctcttttttgattgttgtttgcttgtcatattttttccatcctttgagtttcagttagtttctgtctctaagtctaaggtgtgtctcttgcaggcagcatatagacggatcttgtttgttaatccattctcccactttctgtctctttattgatgcatttaatccatttacattcagggtaattatggataggtatgaatttagtgctatcattttgatgtcttttttgtgtgttgttgacagtttctttttcccacttgattttgtgtgctgagtagattttctttatatattgtcctttcttcatatttgttatcgttgattttgtttctcctgagtctgtatttttcccttgtattttattttgatgagtaggatagtttgtctcctttgtggttaccttattatttatccctatttttctcaatttaaaactaacttttatttctttgtatcactgtatcttcctttccatatggaaggtgtatgaatacatttcttagtccctctttattattttaacattgtcttcttttatataataacatcgctgttaccctgttttgggctttttttttttttaaataatcttgctttgtttttttggatttccctgtctgggttgacttctggttgctccgcccagtgttctagtattgggttgatacctgatattattgattttctaaccaaagaactccctttagtatttcttgtagttttggtttggtttttacaaattccctcaacttttgtttatctggaaatgtcttaatttcagcttcatatttaagagactgttttgctgaatatatgatcttggcaggcaatttttttccttcaattttttaaatatgtcatcccattgccttcttccctgcatggtttctgccgagtagtctgagctttttcttattggctctcctttgtaggtgacttttcatttatccctcgatgctcttataaatctctttttatctttggctttggcaagtttgattattatatgtcttggtgactttcttttaagatctaccttatgtggagttccatgagcatcttggacagataccctctcatctttcacaatatcagggaagttttctgccaacaaatcttcaactattttctctgtattttctgttatccctccctgttctggtactccaatcactcgtaggctcgttctcttgatagggtcccacaggattcttaaggtttcttcatttttttaaattcttttatccgatttttcttcaaatatattagtgccaagtgatttatcttcaaattcagtaattctagcttctacttgctcaattctgctcctttgactttctactgagttgtctaattctgtaattttattgttaaccttctgaatttctgattgctgtctatgggttttccagcttattaagcttttcatatgttcctgaataatctttctaatttcttcagttgctttatctgtgtgttccttggcttgttctgcatattgcctcatttccttcctgatgtcttgaaggtttctgtatattaaacttttgtattctgcatctggtaattccaggaatgcattttcatctagaagatccctggattctttgttttgagagcctgttgaggtaatcatggtctgtttctttatgtgccttgatattgactgttgtctccgagccatctatgagttattgtattagtttatgcttgcttactgtgtcgtagctgcttgctttgttatattcctgtgggttgcttgagtgagctagctggattattttcacctttggagctctggtgtcctgtccccacctggctagagctattatcaggcatatcagtctaggagtccattcagtttccttgtatgaattcagctcaggtttccaggtagctgatcatcaagtatgtgctacaggctctgtcctacagtcttagaggggcaggggtgattggcgtatataccggtatctgattgcagcagggggtcactctctgaacaaggctgggggctgagaactgacccccaagtgtctctgaggaaaatgcgtctctgttccgttgagcgtgctggtgggtggattctgcagagggaccatgggcacccaaagtttttggttgtaaggactgggaggtaccagttatctttggacccctgtcgcgggtggctgggtgacctgagtggagctaccagtccttaggttcctgatgtgagtaggtgaggaccttgtttaataggcaaagcaatgccagatgtcaaacacccacctctccactgcacagctgaaatggttggagtttgccaacaaaggcctattctcctgaaataggcccacacaggtccatgcagaagggaaaggtgctcatggtacacggacgttttgtgggtggacaggagccgcttctgttctgagctcccccagttaatggagctagcaaattatcttttccccccaattgcaatttttttccttccccaaggccgggaggatggctctaggtgctcaccagggtctatctcaggcccagggattcagccgctgaagccagctcagggattggggggaggcgagctctgtaaaatatatgcaagtacttagcttttgccgagagcgccaatctcctcaggttccagaggcatgagtaggctgtgtggctggctgcttctccctgaggaaactgcagccaaatgctagcaccagtccactgccgccaccgctctaggaatcgtgcctgagggctccctgcgattcaggtctggtaactcctctccacttctgaacggtctcttcctccccctgcccctcagttcattgtctaaggttgcctttgatgctcagagctcccagcttgtcacaaatatactcgtttcacttgttttttcgggtctttattgtaaagagggctcgccggaagcatctgtctattctaccatcttggctctgcctcttgtaaatacattttaatctacttttgaatttaataatacatttgaatatcttgccatgtaattgaacttcttctataatattgctttaatggctgaaaaatattccatcgcatagataatccagaatttaaccacttcctgctcattgatggaaaccctggtggcgtagtggttaagtggtatggctgctaaccaagagttcgggagttcgaatctagcaggtgctcctggaaacttcatggggcagttccgctctgtcatatagggtcattataagtaggaatcgacttgacagcagtgggtttggctttttttggttttattcattgatataaggtttcttactgattttctttgtggcaagcaatgttgtaattaacggtctatagctcagtctgtgcttacttccatagtgaccttcaaaacctagcacagtgcctggcacactgcagcctcacagtaaatatatagtgaatgaattaactatttcctcagtgcgctttccagaaaagaattgatgcgtacaacgctatgaacatttttatgatacatggtgccaaaatgcttccaggaagactgaatgaatttatactcctgagaacactgtatgagggttcccataataaatattaattttaaacagaaatttgattaccatattctttgtaaccatcaaaatatcagtgtcccagaacaaggaaaacactgacatgatattctttccctggcctggtggatgcgatatacatcccatataacttacacaacccgaaaatagttactctatggttacccatgatactccttagggaatttttttatcctttatgtaagggattggcaaaatcttgttcactgcctgtttttgtaaataaagttttattgggacaaagccatacctcctgtatgtatttacatactgtttatggccgcttctggactacacttgtggaatcgagtagttgcaacacagactgtctggcctgcaaagcctgaaattcttactatctgtccttcacagaaaacacttgtcgacccctgcattaagttggcatttggtttttgttagtgaaactaatggatgtactcagctgaataaatcagctaccaagcatttattgaacactgtaagatgtgcccctactctcaaggcatgtaaagtataattctggagacaaaacagatgtgtgtataaatattaaaagcagaaaggacattactgcaggagtagacaagtactctaaatgcagactacaagtactaaaagatttcaaagaagggagaaaaaatgagaattgcaaaaatggcaaaatttcactgagaaacagaacttgaattaggccatgaatgaaaaggatagttggactgagaaagaagaaagaactaactctcctagaatcaagagcatcatcatagtgggggcttctgcgcagtgcagaaccaccagatgggacttggcccaggatgcaggtgggcccttatcaaaagaggaagggttttagatggttgttgtcattgttccgactcatagcaaccctatgtacaacagaacaaaacactgcccggtgttatgcttgagcctattgatgcagccattgtgtcaatccatcttgctgaggcccctactctttcgctgaacctctactttatcaaataagggtagtctatatggataaaattgatccatatttatcggtatttcagattatccaaaataatacaaatgaaggcactcattttctatttacagaaatcctaaaatcctctatttaagcaaaaatttattttatgaagccaattttaattttccactctctccctatagctcatatcacctaacttatgctcctccttccccattcaaactggtggtttatttctccagaaacctgaatactgatacaaagaccacaacaaaaccttaaaaagactaggaaaacaaaaacaatgccagtgtctgaatacgacacacaaaagcaggacaagcacactaatctctatcactgaatatattccaaagctccctatgtgacaggacatttttctgagtctgccaaagatacgtctgcttattttctagtgctttcatccaacacaaatgcgatcgtaaactcaatgtctttatttttgttgttgtttatgaattttaaaatacaaaatccttttaaaaacttgcagagaaagatatatttgtagtataaccattattattcagaaatctttactacagagcacattctaatatgccatgggcaaggggagatgaatacaacattaaacgtattctctttctaaaagctttgtgtataaaggtagaggggtgaggggggtaatcttttaggagaatatagagtatgagggaaactctttgcagagaaaattcacagtaattttaaatgaagggaaggttagtaaaataaatgcatcaaaaattccatgacagaatttttgatgccaatattaaatgacgtaggtgttgttcttagcacacacagttcaaaattctatcatgatctcagtttgttagcttcctgttaacacaaatcagacttatgtgatgtgttgaaacagtactggcgtaggttagcatcacagaagcaacatgcacaagagtaaaacaaggcttttcattggaaggcgctaaagtcatagcacagtgagcatgccaaaggagggcactttaggggctttttcactaaaagaacatcgagcatacattactcagccataaagagaaatgaagtcctgatacttgctataacatggatgaatctttttttttctttcttttattgtgctgtaagtgaaaagtttacaattcaagtcagtttctcctacaaaaacttacacacacattgttatgtggccctagttgctctccctacaatgtgacagcacactcctcctccccaccctgtatttcccgtgtccattgaaccagctcttgtccccctctgccttagcatatcgtctccagacagtagctgcccacgtagtctcatgtgtctacttgagctaggaagcactccttaagcactcctcaccagtattattttatgtctcagagtccagtctaatctttgtctgaagatttggcttcaggaatggttttagttctgggcttagagtccaggggtcatgtcctctgaggtccctccagtctcagtcagaccatgaagtctgtctttttactacaatttgagttctgcatcccacttttctctagctccatcagggattctctgttatattccctgtcaaagcagtcattggtggtagccaggcatcatctagctcttctggtctcaggctgatggagtctctggtttatgtggccctttctgtctctcaggctcatattttccttgtgtctttggtgctcttcattctcctttgctaacatggatgaatctcgaaaacattatgttgagtgaaataaggtagtcgcagaaaggcaaatattgtatgattccacttatatgaaatatctagaacaggcaagtaatagagaccagtatcattaatatcaaacccaggtaaaattatgctgaaggtaattaaaaaatggctgcagcagtgcatcaacagggaactgccaggaattcaagccagattccgaagaggacatgaaacaatggatatcactgctgatgtcagatggatcatggctgaaagcagagaataccagaaagatgttcacctgtgtttattgactgtgcaaaggcatccagccgtgtggatcataacaaattatggataacattgtgaagaatgggaattccagaacacttaattgtgctcatgtggaacatgtgcatagaccaagtggcagatctgtggttcaaaatcaggaaaggtgtgcatcagggttgtatcctttcagcatacttttttaatctatatgatgagcaaaaaatccgagaaagtggactatatgaagaacgtggcatctgcgatacgcagatgacacaaccttgcttgctgaaaatgaagaggactagaagcacttactgtttaaggtccaaggctacagccttcactatggattatactataaaataaagaaaacaaaaatgctctcatttggaccaataagccacatcatgataaatggagaaaagattgaagttgtcaaggcattcattttacttgggcctactgtcaatgcccatagaaacagcagttcaaggaatcaaacaacatattgcatattgcactgggcaaatctgctgcaaaagacctctttcaagtattaaaaagcaaagatatcaccttgagagctaaggtgtgcctgaccctagccatgctattttcaatcacctcacatgcatgagaaagttagacaatgaataaggaagacaggagaactggtgtctgtgaattatgatgttggtgaagaatactgaatacgccatggactgccagaagaatgaacaaatctgtcctggaagaagtacaatcagaatgttctcaggaggaaccaatccctgcaaaaggatatcatgcttagtagagggtcagcgaaaaagaggaagaccctcaatgacatggattgacacagtggctgcagagctcaaagataacaatgattgtgaagatggtataaaactgggcagtgttttgttctgttgtacattgggtcactgtaagttagaaccaactcgaaggcacctaaaaacaacataacatagagaccaaagtttattagtggttaccagaggtgggagggagggggaaacagggagtctttgcttaggggacactgattttctcttaatgtctgtggaataatttggaaacaaatattgttgatctttgcacaatatgataaacttaatcagtgtcactgaattgtacacattaaaaacattgaactgacaaatgtttcacacatataatttgacctgtagggggtgaaggggatggagtggaaatgatcagttcgctttttccatctccctgtggcctgagctttcctccccatttcccaggctggtgctagggtttctgtctttcttcctcccttctgccatgttcaagttcaattgggatctctatcctctcctggagctgcagactaagagggagctctcctccatcagggcacctgggtgaatagactcattatcccttcagtccagatcccttgctggtgccacgttatggaaatcaagacattctgagctaatgcctcctgttagtcccaatagcctactatctaattgtgtaattacgaacagttaaagatgcatgatatgcagtagagagaaaacagttggtgctttgggagccattagggattatagtttatgaaaagttaaaacgatgccatttttatatgggcttgcctacactgagttaccacacagatgccgcaccctgctttggggccattgttcctcccctggagctgggaaaggcagaagagaaccaggatgaatgctgatgtaactgtgtggtcaggaaaacagagtgtcttgaggccttgcttcagaaaaccctttatatttctgtgccttggtgttactctctgtaagtagtattaaaactactcaacaatattttaacatttatatttaatactttctcagatccacctatgagaggagtacaaggactttcttttatgggcacctgcatagtagaaaggacaaaaagatccacaccaacctaaaagtaccttaggtattttggggaacaaggcattggatttgcaactattagctacatgtcttccttaaaggttaggcccactcataggcttgcctagtgtgaagccatacaacccacgggcatcaatgggactagagtaacctaggatatgctagagactgaggaggaagatattaatacagcagcaaacactggtgatattaccaaaatacagggttgctatgagtcagaattgacacaatagcagtgaggttgagttttaacagttgatgtaagcctgatgccgaggcagactaccacttaattagggtccttgtacttaagcccagagctctggtggtgcagtggttaaagctttgctgctaaccaaaaggctggtagtttgaatctaccagctcctccttggaagccctatggggtagttctactgtgtcctatagggtcactatgagtcagaattgacttgatggcaacgggtttggttttgatttggtagttaatgccctacaggaactaggacggatcacaaagtatttataagcttcagaaatgggttggcatgggtcacagtaccttactgaataggaagttaacggcgtagcggtaggttctaatggacaagaggagacagaattctgcagggagtacaacatgcacacactgtatcccagtgagaaagcaactgttactattcattccttcattcatttgttcatccttttgtttatattcatgccttccctcattcattcataatagagtcactaaaatctaagtaaatttcactatatgtcaggatttgttttaagtgctgggaacacagcactaatccttgaccttggttcttaggggctcatcatcaatggagaaagaaaggcaaaaggactttgttctggcttccagaaatatgtaaaaacaattctagtgcattcggtggatcctgactatctggaggacaacatttgaccgggaatgtgaaggataaatagaagtttctgagcatagaaaataggaaggtcatccctagcacagggagcagcattgaataattcatggaggcttgaaagaatgcagtgcatttgggaactagcatgtcactctggggggctgctaaggcaaaggaaggcaagggaagcaggcacgtggttgggaatgcactaaaggaaaagaaaggtatttgaatgaatggtggacagtttcaccttggaactgccatcaacatttagtgtaatggcaacatgggtacaaaatgtgtgcatggtatgggcaaaacctcacggagagttaggaccagataatttgttttcaaatctggtttctcttcacttagctgtgggatctgtggcaggttgcttaaacactcagaatcttgatttcctcacctgtagaatgcaaataacacactttgtggggttgctttcattgcttagggggcactgagtttctgttaatggtgatggaataatttgaagaagggcagtggtaatggtttcatgacagaacgagcttaatcaatgtcacagaattatgcacgtaaaaatggttgaattagcaaatcttttgttttatatatatatatatatatataatataaaccaaaccaaacccagtgctgtcaagttgattctgactcatagcaaccctataagacacagtagaactgccccatagagcttccaaagagtgcctggaggatttgaactgctgactctttggttagcagccgtagcactaaacccctatgccaccagggtttccatatatatatatatatatatatatatatatatatatatatatatatatatatatatatatacacaaaatttaaaaaattgtttaaaaaaaaggaagaagaaatgagacaccacatgtacatggttggccaaatgttcttactagtctctgacagtaattcccttccctcatcacaccaaccttggacacttctatacggtgtctgcctcggaaaccgggctctgaaaactcagtttcactcctgcccttcaactgaggaaataaaattgtccactcctggaagcgatctctttccagaaacctatgaccacatccactgaactaagcatcagtacatggtgtcccacatgcttacgtgatacacgtctcacaagtttcaaagcatttttcacctggctatccctcatctccttctgaagtgaaggaataattttaaatattcataataaagtcatatacaatcttggctgatcataggatttgacaaacttttacgtaaatgaccagatagtaaatattttaggctttgtgggccacataaggtctctgtcacatatccttttttttttttttttaaatatacctttaaaaacataaaaattattcttagctatttggccatacatgggcagataagatgggggagatttgccctgcaaactgtagtttgctatctcctggactggataacagcataggacctgagagcattcagaatgatactaccttcacaagggtggagtacgacaaaataatcctgagtagaagtccctaaagtgtgaccttttattaatgggcatcaggaacctactaccttcagccaaattttagagacattgcagcatttaacagagcattgcaaagcagcaacggtctaggtcgcctctcaatgtttcagtattctaaataaaatttttaaaaaacacagaaagagaaactttattatcagcgtgattacaattttttaacactgaatcagatgcatccatgcacacaaacacatatacacacacacacaattattttttcagtgtttacctctaggtgaaaggattgactcatttgggggagttgaactttttgtcatagtattaaagttttaggtggtaccaagagacatcaccttttccttcttgtctggtctcggaatcagctgaaagagacacgtcaggaaaacgcagactcaaatatgacctttgttactgatcgtgatgttgttggcatgtgccttaggaccttaggcaaacaagctcactaactacttcatcattgattcagacacactgcccctccctggacaactaaaggcctcccctactgaggcaggacccctcctgcacaacagaaggagaactagagaagacagactctaaatgagaatcagaaccagatgttaccccctcgcctggggaaaagtaggtgagggagggtgaaagaatatgtgccccaacatatgcttgattgggctttccacaggtaagaaccaaccacaaagcacacaaatttctaagagattgaaagaccaacacctgctaccagaaccttcttctctcagcagtttctggttagagcgttgccatatctgtgtgaccttggatcaatcactttacagctctggatcaaggtcttcatctgcgagttgtaggagctatactaccaggtctactgaagttctttttggatgttcttcactacttactgaacccactccacggcaggtgctgcccccacagcaggagatagttgtggacaagataaattctcagtgcttggaaagcttgcattctagtgaagggaatgtctgaacaaattgcccaggtctgttttccttctgaagccaagtgaaataccatattaaaataatttagaattcattgacacttttctgcttaaatttcttcaaaaatagcagtgagatcacgtgttttttgttgttattgttgtcattctttgtttttgttcatttagtgaaagcatacacagctaaagacacaccatcacaataatttctgcatgtacaattcagtgacactggttacattcttcaagttgtgctaccatcctgctatccttttccactacttttatcttaaactcactgccccctaaacttcccatccaacctatcaagctgccattgtcaatttgatcccacagagataactccttacgtcattataaaacacctgtgatcttgactagtaagatcacaagtgttttacaacgatgtaagaatatgactgccaagctttcatatttgcaccagtctggataacgattactgaagaagaaagaggcagctggagctgttgaacggttaagcatttgagtaagaaggagctctgagaaaattctagaggaaacattgtgtgttaccatacatcatctatgacatagtcattcattcataaaataacaatatcaccatgtggacatcacttgaatgggttaaaaaaaattctggagagtgactttcaagagtagagagtgttaacaggtagaatcaagtagagttcccagatacaaaacttgttaaaacacaacatcttgagacctattaatctctgagtttaattaaaagccagaatgaacaaactactattttatctgatgcccagttccatttggttttccttctgatatcgagagagaatgctggaaccttcttacctatttagtttcatttcctcttgtaaatgagttgagacctaatgtgtgaccccctggagcgttctataactaaaccgacttactagcgaactttacaaatccagtgacaaagtaatgcaaagaccaaaaggaacagtccaaaataattgctgtttcttctttcaatcaatcttctggattaaacacagaatttattgataaagacagagaagtaaccctttgatggagtgagatggtgtatcagtgttctccatactcgttcaattaatggacttcactgtatgcaaacactgataagtggataaaatgtgttccttcttaatgattcaatctgtattctagcaggacataggctctgctacacaaatattttgcttggcaattcccccaaaacattcatggcttggagtgtgctagccatttattttgactgtggggcttgatgcacatctctgctgttaatagcttcacaaacattttacaatgaaaatactgcaccaccagaactaatctcattattttccgtattaataattcttacagcaagagaagaccattagaactcagaaaggtagtgcactgatacttgatatagatgttcaagcgttcctcgccatgtcattccttctttctttcagtcaacaaatccgtattgaaccactactctcttccaggcaccgtgctgttggaacatatttgtaataaaacagacacagtccttttcctcatggatctgtcagtccagtgggagagaggccactgagtttaacaaacaaataaatgcgtgctcatgaattgggctaagtgttagaagagctgtatctttttctgtccataatctgcctcaaacacacctcctgttcattctcttctcactatcaaactcccagctctgttcatttgtttgtgtgaaagtcctgccatttctttgtttttcttccctaatctccatctccaggatagatttgacatgttgagcactaataaccgaagaccaggcaagttgtggaatgacatcaaagacatcatatgtgaagaaagcaagaggtcattaaaaagatgggaaggaaagaccaaaatggatgtcagaagaggctctgaaacttgctcttgaacatcgagtagctaaagcaaaaggaagaaatgatgaagtaaaagagctgaacagaagatttcaaaaggcagctcgagaaggcaaagtaagatactataatggtatgtacaaagacctggagacagaaagccaaaagggaaggacacgcttggtatttctcaaactcaaagaactgaagaaaaaatactagccacagtcactataccaaaaagaattggtcgatgttcaaccattttagggggtagcatatgatcaggaaccaatggtactgaatgaagaagtccaatctgcactgaaggcattggcaaaaaaacaaggatccaggaaatgatggaataccaattgagaagtttcaacaaccggatgcagtgctggaagtgctcactggcctatgccaagaaatttgggtgacaactacctggccaactgactggaagagatccatatttatgcctattcccatgaaaggtgatccaactgaatatggaaattattgaatagtattacacaccaaatcatattcagaagaggacatggaaccaggaatatcattgctgatatccaatggatcctgactgaaaacagagactaccagaatgttatttacctgtgatttattgactatgcaaaggcatttgactgtgtgggtcataataaattatggataacattatgaagaatgggtattccagaacacttcactgtgcttgtgagaaacctgtacatagatcaagaggcagttgttcaaacagaacaaggggatacagattggtttaaagtcagggaaggtgtgcatcagggttgtatcctttcaccatacctatgcaatctgtacgctgagcaaacagttcgagaagctggactctatgaagaagaacggagcatcagggattgaaggtagacattaacaacctgcgttatgcagatgatataatcttgcttgcagaaagtgaagagaacttgaagcacttactgatgaagatcaaagaccacagccttcagtatggattatgcctcaatataaaacaaaaatcctcacacctgggccaataagcaacatcatgataaacagagaaaagactgaagttgtcaaggacttcattttacttggatcaaccatcaacactcatggaagcagcagtcgagaaatcaaaaagacactttgcattgggcatatctgctgcaaaagacctcttgaaagtattgaaaagtaaagatgtcaccttgaaaactacagtgagactaacccaagccatggtgttttcaatggcttcatatgcataacaaagctggatggtgactaaggaaaaccgaagaagaattgacacctttgaattatggtgttggcaaagaatattaaatattccatggactgccaaaagaatgaacaaatctgtcttggaagtacaatcagaatgttccttagaagcacggatggcgagactatgtcttacatactttggacatgttatcaggagggaccaatccctggagatgaataccatgcttggtagagtagaaggtcagcgaaaaggaggaaaaccctcagcgaggattgacacggtagctgcaacaatgggctcaagcacagcaacgattgtgaggatggtacagatcagggcagtattttgttctgttgtacaaaaggttgctatgagtcgaaactgactcgacgacacccaacaacaacaattcacaggttaactgcagattccctgctttattaaaaataattttatgttgttgttgttgaggatataaacagcaaaacgtacacaaattcaagagtttctacatgtaccatttagtgatattgattccattcttcaagttgtacagccgttctcaccctccttttctgagttgttccttccccactaacacaatctcactgccccctaaggttcctatctaatcttttgagtttctgttgtcaatctgatcccctataaaaaccaaaaaccaaaccccctgccgtcgagtcgattctgactcacagcaaccctataggacagagcagaactgcccaatagagtttccaaggaacacgtggcggattcgaactaccgacttcttggttagcagccatagcacttaactgctacgccacctgggtttcccctgaccccctatagatagtacttaaaagagtataatgctcaaggcagacttttttttactagttaagctaaactattgtttggttttaagaagacttcagggggtgttttttgtttaaggtttaaagattatctaaggacaatagtttcaggtattcatccaaccttcatggctccagggagtctggagaccatcagaatttgaaattctgttctgcattttcccccttttgaccgggattcttctatagaatctttgatcaaaatgttcagtaatgatagctgggcaccatccagctcttctggtgtcatggcaaaggagggatttgttcatggaggcaattggccacacattccatatcctcttctatttttgactttccttcttcctctgttgcttcaggcaaataagagactaattgttgttccttggttggtggcttggaagcttttaagaccccagctactgcacagtgaaataggaggtagaacagaagcactaaagaagttgtgcaaccattctcaccgtccttttctgagttgttccttccccattaacacaattatatggggtgttctatgataccatgaagccatgaccctaaacttcaaactaaggaaccaaatcccatgaggcagttggctgtacataagcaacttcagcagctactcttttgtgtgtgtgtgtcatttttgtaaatatatctatcacataacttctgccaattcaactttttacaggtgtacaactgattgacagcaattacaataatcgtctgtgcaaccctacccttaatcaatgcaatatttccatcactgttaagccttctctttccccctccatcccatccctggtaaccagtaataaactctgttctctacacatttgccttttcttgtcttttttatataaatgagctcatacaatatttgcccttttgtgaccaacttatttcactcagcataatgtcttccacctccatccatattgtagtatttatcaagacttcatttcttctactggctccttgcttttgatccagcatgaaagcattcagtattagctcctaatattctaaatacagtaccttggatgatgataattacaattcttgctttaaaggtagcacagggtctgaacaaagcctgttgttaaatcctataccacctttttctgtaaccttggggaagctatatcagtctcttggagtcatggggacacgaactcactaaatcagctgataaggcatgcctcattcagttttgtagagccttgtagcagtttctgtgaactgcagcatttggtcctcattctcctacttttgggtcatgcctaattcatccttcaacatgggagtacaatctctctctgcccaactcctctcaaaccttcctcttttcaatgaaacttgaagtctctctgccctatggtgctgctgctgtcaggacaagctctctctaccgtctcttacttctcctcttggctttcttcccatacctccttctctgaccacccggagacctctgcctctgccttctactcagcaagtgtgtggtctcactttttaaactgtgttgcattatttatgctagtggtttcaaccttatctgatgcaatgttccattttatagccaatgttatgtaatgccacctttactatcctgaaaagaaatagataatataacttatctgcaagattattttgagaaaaaaaaaaaaaaaatcaatatgataccctcacagtaacacaactgagaaataaaaggaaagtaatttacaataaaataacattacagagaaagggtatcttacaacatataatgaattaataagcagaagcttacatcttcttttaaatctaaaattattcattacaataataggagctacttttaattataatgactcattttaaatttaaaaaaagaaaaaaaaattttttttttttttaagttccatacaagcagggaaaccctggcggcatagtggttaagtgctacagctgctaaccaaagggtcggcagttcgaatccaccaggcactccttggaaactctatgggggcagttctactctggcctatagggtcgctatgagtcggaatcgactcgatggcactgggtttggtttttggttttatacaagcagtatacaaacataaaataactgaagtagaagctgcacccccccccaaaaaaaaacaacaacaaaaccctaacattttgacaaataataaaagactagactcaccggtgcagggtgagaaatacagagaaaaccaccttaattaaggcaggaaaaacatgcaaagataagttatagacccccaaagtgcagatgtgaggaagtatatgacgttctcgtcaatgactcgagcctcacttataagtgaagtgtttagttataacgtgcaacagggtggtgacaaataccacagcaaacagatctcttatcgtaaaaccccacaacccactggggtttgcattcagtctctcgcatgtaaaaagctttggagaacatacttttcaataggctgtgggaaataaagcataaatgagaatataagaggctaaaaatgactgtgtgaggatctcccagggcagaatcaaaataagatggaaaaatgcaggtaaaccaaatgagtgattctcaactagtaattcccacatagatttcttatctagaagctataagattttatgtacataaatacatgcatagataaacacacatacatgaatacatacacttacaaatacacacacacatatactatagcaaaaacacaaactatttttaaaacaagttttagtatttagctacaatctgctacagggcagtgagctactggtatgttttagttttgcccatttttcttatgagtcaccttactgggatttgccatggtaacagaattcctttcaaccatttctaggcattggtcaatgagatggcaaatccagatttaggggaattcagggaatcaagtctaggagaaaactagcggatctaagaaatgtagtattacacagacagatgcaggtgctagatggcgctggacacgattttcagttcttgactctttctagttacatgacctttatcaacttacttaagaggtctatgtctttatttcctcaactgtaaaatggagataataaatctctttccttgggagagttcttatgaaaattaaattacatgcagcatgtaaaatgcttagcacagtgcctggtatatggtaactcttaaataaatattagctattactattgctaatattgtccttgttgttgttaaacgttgttgagttggccccaacacacagcgaccccatgaacgacagaatgaaatgctccctggtcctatgccatccccatgatcagttgggattagatcattgtgaaccaaagggctttcactggctgagttttggaaacagatcaccagacctttcttcctcatctgtcagtctggaggcttagctaaaaccggttcagcatcatagcaacacacaagcctctactcagagatgggtggtggttgcacatgaggtctatcagctgggaacaaaacccaggtcttcagtgtgaaaggcaaggatcataccactgatccagaggctaaaaataaattatcacttcattaaattaaaaaaaaaagtacgtagtggctgtggtgtagacctgacaaactatacacttttagtttgtgcacagaagactttcccagcaggctactcagatttagggtttcgtctccgtgggttacctttaaataaaacactattccactcaggaagagcagcacttgtacaccacttgtggtgccctgaacttcctcacacttctacatcggaagcctgatacccggcagagatttctgagtggagctcaaggtcagtaaatcattatgccactcaccctggagatagcgaacaaacccttctttccacgtgggtttttacaatatgacatcatgacatctgatgatgtgaccaacctcttgtcactaatgtggaaactatttctaatggaaacacagtgctggctttcctccttctaaatggcaaaggagaggccatgccattgtctctgcagtgatttccgttctagtgagtcacggctgggcaggacacgtactacttaactgcaagggtttgcagagagaacaagtatggttcctgctcatgagacatttactgttggatgaaggagaatggacagatgcatgtgaagtatgctgccttctgaatgcattcctctaccacctagaggaggcaaggagtaatatacacaatatgtaacaatcactgagggtggaagggcgctgagccatcagaatggacactggtcttagcactgcagcagtcttggaaggtccttcgtgtatcaggcattaaccctttagctgctagactgcagaaggtctcaggtttacagggagggcgggccaagggtcccagggagggacaggcagctcagagccttacagggaatgaaacacatttcaattggctacagggcacttgggaggcttggctatttactaaccagcatggaagtattccagtattctaacaaccgtgtggctacaaaagcacaatctggtgagtattggccctgggcaaggctttgatgaattaggctggcacagtgatacggctatgaatcctggggcagtcaaagagtaggagacagctgagcacaatatagatgggcatccctgtgcactggggtaggcacagttagttctatatagagccatggaggtggagtgcttggcccctgcagttctattttagtactttttatcactttctaattatatgaattcaggaatccaatttccttgttcaaaaaatgaaaacattactatgaaggctaaataccacctgccttccaaagtctggtctacctatacagaggtaaatattgtcatcaatttggcagtatgatttcaagtacctttctacatatgctgttgttgttaagtgccatctagtcatttctgactcatagggaccctacaggtcagagaattgtgccataggatttccagggagcggctggtggatttgaactgctgaccttttggttaacagccaagctcttaaccactacaccaccaggactcctttctatatacattcacatatatttattgcaattgctttgggtgttatctatgtgtttatatatgaggtaggcagaatcgtaaaacactgcacttagatttcctactctaatgcccagaactgtgaatatattataccctgattatgttaaaaagtgattttgcaaatgtaattaatgttactaatctgttattcaagacagatcgatgaccctgaggggcctaatcaaattacacaagccctttaaaagcagagtcttctccaactagtagcaaatggggaagtctgagagattccaaagatgagaagagcttgatgagccattgctgctttgaaaatggatcagaacacatgccaaggaaggcaggtgacctcaccagttaagagtggccccagctgatgctcagcaaggaaatggagacgtcagttttacaaccacagaaactggattctaccaagaacttgaacgagattggaagcagcatcctcccccagagcctccagataagactcaagcctgactggcacctaggtttcaaccttgtgagaccctaagcagagaacctcgatgagcctactcagactttagacccatgtactgtgagaaaataaatgggtgttttttttaagtcactaagttagtggtaatttgttatgcagtaatggaaaattaatactacatgttagattgtttcattctaccattcgtttttattaaagaacatgtctcgtaaacatgcaaattaattcattaattttaactgctccacagtatatatcctgtgtgataaattatttctaaagatggcagccaaaaattcatctcaccattgtatgagcctgccattcttcccataacttacccatctccctgaatttgggctggccttgtgtcttgttttaaccaataaaatttggtagaagtgatgttctagaacttctgagctcaggtcttgagacactgtgaagcttctgcttttacatgagatccaagtaccacgtaaagaaaaagagaaagagtgagagatccatccagccccctagacaagctccaggtaatcccaacagactctacgtaaaacagaagaaccactcagctgagcccagcaagcccacgtgagaaatactaatacagtgttatttaagccactaaatcttgtggtagttctttatacagtaataaattataatagatattatgaaaaaaattattaatgttccagtttatctacactcctcatgaacagtacttgtgttttccaactactaaaatgaaccacatgaaattgccacttctgtaagtcagtactggtcaaatatcagcaatttttcgaggttcgatcttataaataaagctgattaaatgttccttcatatgcttccctgtgcatacgaaatagtgtttctctgtagggtaagtactaagtagaactgttcagtcatagattagggcacgttttaacagatgctcctaaattacccaccagagtgtctttatcaattcatgctcatcctatcaaagtgtaatgctaacatacatcacttgatctaaatatttctgaaattccattataataaaaatggctatccaggcctcaaaatgcaaccaactttatatgatctaatctcaaactaaagaagtattggcagacctgatacaaaattactgataacccgcaaggcattttaatttaaattttaaatattctattgtaggtgatttttaagaaagataggtagggctttttttaaatattattgtgtgatagttatatttatattaaggtgacttatgttcctggcatgttactatgatgctagaagctatgccaccagtatttcaaatgccagcagggtcatccatggtggacaggttacagtggaggttccagactgaggcagactagaaagaaaggtctggggttttacttccaaaaatcagctaatgaaaactttatggatcacaacagaacactgtttaactcatttgctttggacatgtcatcagaagggatcaatcactagagggaaacatcatgtttggtgaagcagggggccaacaaggacatgagagacccttggtcagatggattggcacaatgcctgcaacaatggacttgaacgtgctgctattgtgagaatgacacaggaccaggcaacagttcattctgttgtacataacgttgccataaatcaggttatctcaatggcagctaacaagaacagcaacatattccatgggtaacccacctagttttggggaatgaaattagaatagcacaagtggtgggagggtgcatgagtccaggtggtcagagaatttccatgacactggtgacacaatggttaagcacttgactgctaaccaaaaagttggtggtttggaccgatggttctgcaggagaaagacctggcaatctgtttctgtaaagattacagccaagaaaatctaatggggcagttctaatctatcacatggagttgctgtgagtcagaatcaactcgagggcacccaacagcaataagacgataaaggatgaagacatcttgctacacagaaagcatcagagttatccatccctgttcttatatagtcaaataatatttacaacatatttactaaaaagcatcttaataaatccatttgttgaaggcagagttgtaagctctttccatagaatagttatgtgtggcagactgctacttgtcccccactattgggttctgctcttcatccaaagtaatacaagtttaccaggacacatggccacatttcctcccatctttcgtggagctatgagtagctgtatgaccagatgtaagctagtgtaacgtgatgctatgtgttgcaacttctaggtacttctcttgaatgtactgggcatgtgcagccctgattccttatcccctcccccatagctgggagataagacaagaatgcaactgccttggcccctgacatgacaactatgggctgaggatggcaatgtcattccataagccctgcttcaaattcttattcaaaatactctattttggggttttgttgttacagaagctttgcaggtgccctgagtataatttcaggggttctagaaatgcaaaaaaaaaacaaccggcatcatcttcatctctttatagatgcccaaagttatgccaacaggctttaatttctttggcctatgggtactaacctatgccaaaatgcaaataccccaagaacaagtagctttactagtcttccatccctcagtgtttatttgattatcaggtcctctactgtgaacaggattcaaaaaggaagaagggaaatgtgagttccctgagcatcttggtgagtggtcagagcaggaggagaaggcctcctgagacggaggaggacagagacacagaggatgtaacaataatcgattcctatctcaccgtgtggagtccctgggtggtgcaaagagttaatgcactcagctgctaactgaaaggttagaggtttccgtctacccaggggcatctcagaagaaaggcctggcaatctaattctgaaaaatcagccattaaaaaccttataaagcatagttccgctctgacacacacagggtcatcaagagtcagagtcaacttgatgagcactggtaggtagtgggtatcttaccaggtagccacaagattctgactccacaaaggcagggcaacattacaaacccaccttaccctagctgactggtagtgagctatgagataaagatcacagaaccatgtgaatttatcagggaacttgtcagagtttacggtctctgatgattaacacaggccttcactacatccagggaaactccgctacctgggaaggcagtgaggtgctctttccccaggaaaaatgccccacgctgcctactcacctgaaaagtcactggccttttcacaatatttctattatgtcctcttcaaaagttgtgtatgttctagaaaacaaaatactaatttccctcaagggaatctgcggaaggaataaaaaaagtattcttcttgaatgcttttcttaagcactgaaataaattagaactattccaaaaatggaatggagatccccttctgaaataccaggataaacacctcaagtgaaaaaaatttctagtgtaatgtgtttttaatcaggcacatcaatctaaaatttttgcaacatctgtaaacttgaatgctattgtataatgtgaccaaaatgcattaaaataattgcattagggttttgacatcactgtataataggtggacagtaattgtccagaaattacagctggatctctgcagaattagacattgcatctttgttaggattgaatgactccgtcatgattaatgatactgcagtgaataccaagggaattaaaatgattagccacttattctaacgtgttgatgtttttccatgattttagttatgtttcaagcaaaactttgcaagtaactgcttactgctaatggttactgagttaaatccggagacaaatattctttaagagctcaacttcatgaatgagtaaatattaaacacacacacacacacacaaacaactcttagtgcaactatccactttaaataattaacagcaggtgaggtgtttaatgccctatttatatttaaataatacaaccccgtaattaaggacatttggcataattaaaatctacataataattatttttcaaaatagtccatgaaacacagactagatactgtggtaagtggaaaaaagactcttgtgagtaattttggaacagtagatactattaagattgtcagctatttgcagctttttaagaaattataaagagaaaaagcataaattggtgtttaattgttaatagaagatgttataagttcaaaagtacttgcaaacactttgcagaagaataccaaaaaaaaaaaaaaaaaaaacccactgccatcaagttgattctggctcatcccctgaccgtatttgataggaattcagcagcctcagacctgccagtgccttagaaaataatcaagtacctgaaaatgggcattaaacattcatggagaaagacttgcttttacctactatttcagaattctgcaatattagtttctaagacatatacaatactgtaacaagatattgtgatcctaggactagatatttttgatcccaagagtaattttgtaaatgactgaaaagtgcaaacgctattaaagaaagtaagcatacatagaaaggacagctctgaaccgatacaaaaacagccacaagttcaagttgtgaatttgtctcttatttacccaatgatctccctggatctggagtcctgtttttttttttttttccacccagttccccagttcaaaataatataacaacgctgagaaaacattttaaactcttaggaataaagctaattcatttcctcctgtgtttatcagtgtggttggacaccctgaatcaatcttctcagcaactcaggtatccactggagagaaatctgagcacattaatgtcggggtcattgccactacctagctactgatttctgctaaatttgccccaagttggctgtaatggctaaagacataggccatatctcaaatatctgtatttttatattccccacatgcctagcaaaggaccacagagatagtctcaaaaatgactttttgcttgattgggctttcagaattctgctggtctccatcccacgctccctaatggataaagtcaccttttctccttaatcccccttttacttgtcaccccctcttcttttcttacccaatttcctagaatggggcttggccactacagcttggaagccaaatccagcctgctatttacttctgcaaagaaagttttcctgtaatacacctaagctctttctttatctatagcctctagctgcttctgtttggcagaggcagagtggcagggacagagcagtatggcccacaaagcctaaacttctcctcgctggcccttcacagaaccagtttgcctccccttgcactggggtatacatcctcagtgtttttatactaaggaactcctctgcttcttctctgaatgtggttggaaatgtcaaagaaagggactaactggtggatggggaatccctcctgacaaactatgagagttcatcaataacctcagtatctcacatagaccagtcatgctctccgtacccagccataaattcccaaagggaatgccactggcaagagtgacccatgatcaaccatttgatctactaatacatggggatccccacctgagttaatcataatgatggtccagtccagcctccactgagctagctaattcccactcatggtgaccctatgcgtgtgagagcagaaatgtgctccatagggttttcaatggctaatttttcggaagtagattgccaagtctttttcctgaggtgtctctgggtggcctcgaacctccaaccttccagtttgcaccacccagggactctcaacgatgatagctacaaattattaataatctgatactaacagttaaattttaccgagtactctgcaccaggctcaaggaagtgcagtcaagaaatgaaacgacgtattgcatcaggcaactctgctgcaaaagacctctccaaagtattaaaaagcacagatgttaccttgaagactaaggtgaacctgattcaaaccatggtattttaaatctcttcatacgcatgtgaaagctggacagtgaataaggaaaacggaagaagaattgatgcctttgaattgcagtgttgctgaagaatattgaatatatcatagactaccagaagaatgaacaaataaatcctggacaaagtatagccagtatgctccttggaagcagatatggcaagactttgtctcatgtactttggacatgttatctccaggacatgtacctggagaaggacatcatgcttgataatatagagggtcaacaaaaaagacgaagaccctcaacaagatggatcgacacagtggctgcaacgatgggctcaagcataacaatgatcatgaagatggcgcagggccgggcagtgtttcgttctgttgtacatagggttgctatgagtcggaactgactcgacagcacctaacaacaacaattctgcacgagacacttcatacatgttattttatttaatccacccaaaaaccgtatgtgactggcccattttacagattaaaaaactgaagtccacagagctaaaggaatttatctaggggtgcaaaactagtaaaaaggcagaaccaggattgaacccaggcagtgggaccccagagatcaggcatggtatttacatttctgctctggctgtatttctgaaccaacacacctgaattaacacagtaaaaattggattgtagcaacaatataagaaatacttattgcttatagtaaacttacaaaaaaaaaaaaaactcttgtttattttaactcaatttaaattatatcctcaaatgttatttctcttttgatcaaattaggagtaatactttctatttaagttgttgaaatgagctctcttttgtggtttgaaaaaaggaaataaagttgtgtggtaaagtacttcttcacaacagtttctccaatacagaggtgagattaaagttagcatttttaatattttgttgatatttatattttttgcaatgggtttggtcatagggaacttaaattatttttgattcaaggggggaaatacgctaaaagcaatgtctgaggtatatagaaagaaagggccctggtatcaaaggatatttcagggtttaactggaagactgttcaaattttactctgtgacatatgtggggctaaggaggcaaagcggttaagaagtaaaaatgtcccatgggatggccgattgaagaattccgtgagagataataggctcaggctgaacccagcaggtaacatcagatccaatcctcacaccctcaacagcacttcagcccactcctcagagcatacccgatgctgaaaacctgggagaaaaacagtttccgggggggagggggaactgttttatacattttgtgaaaatataaaaggaaagataatgattgtaagagacagtatccggccattaaaaacgaattctgctaaactgactttctctttccctccctctctctcctttttttctttcaatagaatcctcagctcagggaaacagtggaagtcaaaaagtataagggaaggaaaacaggatggaaggagctgttttgatgtgttaattatttccctgcaaatggtttgtaagctggtatttgtataaaaaaaaaaaaaaatttttttttttttttatttgtttaagaaaggtcattccgctcttcaggaccttggttccaaagtccaaactgccttttgctttcatacatctcccaccccactttattctactgccccaagaacatgtttggttctgatattgctacttgacaagcatataaacatacatacactgtatgtgtgtataaggcaaaaggtctcatgagttcattacactcctaaccacaagagtcgccagtggtaagaattgggaacagaggtcctggggaactggattctagtcccagcactgcaaacaactccatttgtcactttggaaatgtcacttgccctcttggagcctcaatttctccatctgaaaaatgatgggtttggatcagatgatgtcccttctggttctgatactttatcataagtgtggctggctatgactttaccctatttctacggtgctaaaagctcatttcttttcgttttccccagtgagaatgattgatagcttcccgcttagcaatctcattacatatttttacatatttggtggttattatgttttcctttcatcacttttgcacttgaaggaacagtacaaagttatcttcatcttcaaaagtcctactttcatttttcaccattttcttctctgactactttttgaaaactagttttctagaagcagtgtagtatagtggttaagactgggggctctggactcagaccgcctcgtctgaagctacttgctggagttgagactttgaacagtttacttaacatagtttaggtcacgtatttctatttatgaaacaggtattttagtagtgccaaactcctcagttattgtgagaattaaaaaagataaacaccttcagctgaataccaggcacaaaatcgacactattgaaatggtagctgtcattattttggttgtggtaattgtttatgactcctctttatcaccgtaatgccccagaaaaccagtgctttcaatggaatttacccatataaacactaaacaaggctagagaaagagattaattccattcttttaggcaatcacattgtttgccattgttgtcattgttaggtgcagtccagccagttccgactcatagcaaccctatgcacaacagaacaaaacactgcccggacctgtgccatccatacaatcgctgttatgcttgagctcattgttgcagccactgtgttaagcatctcgtcgagggtcttcctcttttccgctgaccctgtactctgccaagcatgatgtccttctccagggactgatccctcctgacaacatgtccaaagtatgtaagacgtagtctcaccatccttgcttctatggagcattctggttgtacttcttccaagacagatttgttcgttctgggaatcacggtacttactttttaaaaataaacttaatggctgaagtgacttttgtttctaatcataccctatgtaacccttttatactgcccatgactttaggaacaacctttcaatatttctgactaagagttgaccctcctgaatgggcagagaaactatgtgttcttaatttttgacttaaaaaaaaaaaaaagttaaatgatggaaaaaaactacaaatctcagaaaaaaagcatgatttcttcttaattagcatagaaatcaggcagctccaggacacctctagttagacactgagcatgacaccacggagatgtggctacaaagccaccagaatttctactttctgaaaatctaatttttgccaattgctcatccttgactacgacccttcttactgaacaagaaactgaagatattactggtacggccagaatttcataccttcataaagaaactcacagcttctaaatatgaagttggccacttgatcctgagcaacgaaatttgttaagtcagcctgaggtgtaggtttcaaaatctccagtgtgcaaagctgtacccagaacagaagccagtgtcggtggctatggaagggctgcaggactgctaccatttccccctcgcttctactctttccctccttaatttccttcaggacctgagcccatgatcatgtttgttcctgctttgatctaccctttcctgcggcctttttccttttatcttcttaagcaacaacaaacttagctttctcatccacacatacccattgccactgagccaatttctactcatagtaaccctataggacagagtagagctgccccatagggtttccaaggagcggctggtggattcaagctgccagccttttggttagcagctgagctcttaaccactgtgccgtccacatttgtaaatacccaaagatttcactcactctggtgtgcctttggctgtttctttcaggactcttaagtgaatttcatcagaccccgttgacttcaacacattcaattactgcagtgtgccttacctgcttcctctggaagtgaactcgcctgcttggctcattaactgttaccgtatgagcttcttttcactattaacctctgcagtgaaggctgagacagaggagctattcagatctcacagccttcccgtcatgagcctggctagctctccctgatcggtagcagacctcctcctcctgggcaaccctcttctgtcttgataatacgtacaactacttctgtgctgcagggggaaatgggcagaggatccaaatggaggatctaaataacacctttcctaaaaaatatttttgtttttgctgagaggcagtggtggttcagtggtaaaattcttgccttgcatatgggagaagaaggttgggcttctgactaacgtaactcaagcatggtcaccacctgtctgtcattggaggcttgcacgttgctatgatgccgaataggtttcagcagagcatccagactaagctgaactaagaagaaaggcctggcaatctacttctaaaaatcagccagtgaaaaccctatggatcacaatggtgatccgaaaccaatcacagggatggtacgggaccaggtctcacttcatttggttgtacgcagggtggccatgagttgggggataactcagtgacagcaaaaacaacaaaatttaaactgcctgcttatgttcttggcttaaaactcttttggtttttgtccccaacatgttgatattaagctttcacagccatagaaataaaacataaatcctgctcacacaagccaaaataccaccatacgtgctcttgttacctacccacactccttacaccttattcttccctcccttggaagccatcctcacctcctttattaaaaaaggaaaatcgctagaagctgattatatttcacccagagggattaagtgtgggctgtcctaaaggatagctttgagggaggattgagagagagaagccaccctccacatcttttagacggcatgaggatcagcagtggctgcttagtgggcagttatgtgaggcacacttggtagcatttgcccaggtgctcttcttacctcctctccaaagggggagccctggagccatagtggttaaagagcttggctgttaaccaaaaggtcagcagtttgaatccaccagctgcttcttggaaactcaatgagggagttctatggagtcctagagagtcactacgagtcggaattgactcaaaggcaatgggtttggttcttgtttttttttttttattttgtctccaaagaggagataaattctttctttccattcatgcaggtctccagtaactgtcaccctgtttcagaaaacatgtgatatttaagttatataatttctaagtaatgactttccttcttctccttgaatgcagttggggagtggtgaggcacaacttgtatgaccataaaaattgcagtttttaaaaaatgtggttcggctggactattcacagagtgaatgagattgtgaaaacagctgctttggaagtctgaaaatttttattgactcataaaatgtaacagtaagaaagaacccagttgttcattttagaaatgaagaaactgaggtcccaggatattataggaatttgctcaaggtcatacagctccttgttcacggggggctgaagacaaaacaaaaaggcttacaaaaaccagtctgctggattttccattgtgggtattgtttcccttctttgcttcacatgccaatctttgttaacctggtcttatatgagagcagttcttagctcatcccactgttccctgcaaccaaagtagtgcagagttgtgaaaaggtcatttttaaataatcttccaaaactttgggtcagaaggtatcatatgaaggctcttgctgtctggagggaaacctagagcaaacactctatgctctgttctgcaaagtcccacaaggtaggaaggaccacagccagctcccaggacctccttgtcatcatctaacctgtatagcctaaaatggtgctagtgtctccaacaggttctatggatcatgaatgtggctgcaggtcaaatgatggaatctgcacccatgcacggtgtttgctttgcataaaagcttttttactgcaaagttgggtacaaattatgatttgggaatttgaattctagctcaaaagcagcagaggaactcattatttcaaggagctttgcaataataccgcaaaacgtaaatgttgttggttgccttcgagttggctctaactcacagccaacctatgtataacagaacaaaatgtcgcttggtcctgcaccatcttcatgatcattgctatgtctgagttcactgttatggctatggtatcaatccatctcattgaaatgtaaataacatgccttaatttaatgttagtaaatccatattttcacttgctgaattttcacatttagagtttcataaaatagtggcacatctgcatgtagtagggaaaatgcccctgactaaccctaatagtcaatgtttcccagtctatgatgagaacctgcagtcagacatttactgagcacccactatgtggtaggtcctatggtaagttccacaggtacgagtataaacatatagcccttggtcttggggagctcacatcgagtaggggaagcagacctttaaaaataatgtagggcctcatctaaatggttttgctaggcattacatcatcattgccttatctctgcccatctagatggcatattcttctaaggtaggaaataacctttgaacattatctagtccatctacctcaccctaggcaagaataacatataaccactcctgccacttaaaaaatgagctcctatctaacaaacctgctgtcattgagtcgatttcaactcacagggatcctatccattagtctctaatatttaaccatctttactattgggacatagttgtactacttctagcctaaatctcttatactgtaattcaagttcccttctcttctttcactggctctttagagaagatgagaagcatttcaataacttgaaaaccatcttggtttcccattttctaggatccacaggtttgatttataattaactacatagtatttctatgcctaattttactctgtgcctatctcaatctggaaagcctgaaagtgtatgcagtagacacatagaaatatttggcaagacaatgggcattgtgcttaaggctggctggcactgaataagatagacgaatgctagaagatggtatccatttgtacatgtcagcattctggcatggcacctctccttttaataaccgctctccaggtaccctgtgtgagacaaagaaccaagctctctacctcgacttagaatcaaacagccactggcagaccaaaggtcttcaatcaacatgaatggatggatgggaggaaggaagaaagaggcaagcaaggggtttccatcttactataatgaccaccgttaactctgtcttatataaaaatttctacctctttaatattcggggaaattatgttatggtctatcattctgatgagctctatactcatttctaaggagccctgttggcacggtggttaaagtgttcgactgctaaccaaaaggtcagtagttcaaaaccatcagtggctccacaggaaaaagatgtggcagtctgcttccgtaaaaatttacagccttggaaatcctacggggtcgttatgagttggaatcgagtcgatggcagtgggtttggttttggttggttatactcattcccctcttccttctttcacatcatgatacggtcaaaccattaactgttgcatgatttataaaagaagcaattgcaccaagctgttctggagcacatattaaaaaaatgataaggcttcaaactacggaatattaatttaaacaaggtaagctctctgagcatctcaagataaaaaggctttatagaactaagatattatttactcggctgaaatgtatctaagagctatatagtcagacttttaaacctggattacataatgtagactgcaaaatctatagaaactcaattttaccaagcagtttggaaatacggaagaccaaatttttttctcatctaaaaggtaaatattgtaaattatcttcaatagtaaatcaaggaatcagcaactctctcccactaattcagtaatgccttctgtaaagacagttatgagaattctatctcccatgggcttccaaatgtaagccaacctaatgagactgtctgatagttaccacccaagtatacaggaaatagaatactggaaggtatggaattcatgctcttggtatacatcttcgtatacagtatacatcttcgtatacacacacatataggcttaaaaaaatctaggtttcatattaaacatacctttgtgtgatacaaaaaaaaaaaacagctatagtaatttaggagtctgattttattttaaacctttctcaaatgaagcattcttttgaattcaaatagtgatgagaattaaaagtatgtctaaaaaaaattttttttagtttttatcaagaatggtcaagaatggattccattaggcattgccttagtcatctagtgcctctataacagaaataccacaagtagatgactttaacaaagagaagtttattctcccacagaccagtaggctacaagtctaaattcaggatgtcagcaccagggaaatgctttctctttctgtcagctctcgagggaggtccttgtgatgcatcagtcttcccttggtctgggagcatctcagcacaggaacctcaggtccaaaggatgcgctctactcctggcactgctttcttggtgatatgaggtccccaactctctgcttgcttccctttcctttggccacaccctaaagaaactccctttacattcgatcatggacgtgacctggtaagggtgttacaataccaccctaatcctctttaatataaaattgcaatcagaaaatggaggacaaccacagaatactgggaatcatggcctaaccaagccgaaacacgcatttttggggtgacataattcaatccatgacaggcatactcaataataccaagtttttctggaaaaaaatataataccaagtattaaaacattggcatctaaatatggtacagaaagtcttaaatgaagctcagaaaaaatactggcaacataaactaaattactgtaccaagtagccacagaaacatgcagaaacaaaggcgctcaagtaaataaattattctgattttgctcctagctgacacaaattactcatttccttggacttgatgcaataaggtttcagagcaaaagaagaaatgcaatcaaagagcaaagcacattactcatcgtctgccagctctgcagtgactggagtttctcatcaccccttgtaccccatggccctacagaaggtgaccgtgagctagtctcttatatgcttaagtgttttattcgacagtcctgatttctctttgtgggctcctgtaacagttcttaatggtgtcattatgactcacaaccaattgcaaagtatctcttctcgctacttctttctaatacagtgttgaagcctgtaaattatttatttttttaaaaaaagtgggttcgggattatttctaaaataagcaaaggggacagtcaaagtatttaagactaataggggcatcgaccaatcagaaataaccctggctaagggttaggcactgtcccgtgtgctgaatggtggagaggtccaaaggactaaccagttctggtgaagagattcagactcatggcagccccaagtgtgtcagagtagaaatgagctccatatggttttcaatagctggtttttccgaagtacatcaccaagacctttcttccaaggcacctacgggtggactcgaaactccaacctttgggttaggagtggagtatgttaactgtttgcaccatccagggacccagaacactagggaaggagaagctagtgcaagggccactgagggagaagagcttcaaataagactggctcttcaccaaccaagagggaagtttttctgcgtgttaacaacccaatgcatctcttagcgaaagaaaaagctgaatattattcctgatcatcacattaggctcattcatgtccatcccgctgtgctttcttcagtggaggaaagaggcagagtgacatgatctgctgaaaactgcacatgaactatggcttttctcatctctgaacccaaggaagtgtaccacatacataattctaaaggcagagttacacctgagtacttttcctctcaccaggtgagggaaagagagagtgaggcctgtttccacatattctttattttgaccaagctgaattcaaaagaattgtcgtaagcaaagagcgttgtaaaagctatagaatcacttgcccatatacccattcccaacaggacctcactgaggcctgggccactttggctaaagccacacctgatcattgtctctgtgcatctatctgatcaactggcaaatatttactgataccaactctatttgcagtacccaaagagatgcacaggaagtataagattcacatagcttaagggcagatagtctgcctatgaatcaaccagtgaataagatcaactcatttataattaaatcattgtggaccagagtcatcatgacaataattacctagagtttggcagaccatataacacaccacaagtgatcctgtgacctccacctacctcaacatccagttccgtgcttcccacagaagcaagactatccccatcacagtggtatgatgtcaagcagattgagccctgatacctttagtgcagaaagaggcaatgtaagaggaactgcttcttcgttactgtaaccagttatcatttcattcaagaccctcattcatactgggctgtgatgaaccagctgcttgaatgggaaatacaaaatagtgaccatggagtaaaggagcactagtgtcacaaaagttaacagctcgactgctaaccaaaaggttggcacttcaaatccaccagtcgctccttggaaaccctacaggggagttctactctctcctgtagggtcactatgagttggaatcgactctacaacaatgggtttgagtttgtttcttttttggttacggactaaaagataaattagtggaaaatcacatgacattttgtcctaggaaaagagggacatagcagagacggagtaatagaaccaaaggagggggaaaaataggtactaaaactccaggtgaattaagaaaatacacgacaggagttagaacagaattctggctaggagacagaactgcaaaattcttcataggataaaatgaaaagatcatgggcacttcaatatataaacatagtatgaaacttcataagtggaaaaatgtgtgtcaggtactatatgtaggttcttactggtcttataaccttagctctctgagcctcggtttactcatctttaaaacagacctaaagggagatggcccaagatggtagcttagtcacacacaccacgctgaccatctagaacaaagaatcgagaaaccaagtgaaagaaatacagatgataatctgggaacccaaaacagcaaacaaaaggatgaagaattagattgaacaccaaagggagggagaaaccaaatgaaaccactgacgaaggagacttacagactacggggccccgacaattggcccattacagtgtggccatcttgacactaagcgagcagcgttccggtgaagaacacaagaaagcaacttcacataattcccaataaagacagaaatactgtctcgaaaaacccagaacaaagcaaggcgagcagaacatgaactggaactgagggaaagtacaggaaggagagtgagagccctaggaaaccagatgaccatagagcagggagggagccaggaaaaagggactgaactgctcaccagcagtagtccttgatcatttgggctagtggtgctggcagagcgggggatccttggagtggtggctaaagattccccaccagaccggattgtggacagacctcactcctcacgtttggtcggggctaggtctggggttgtactctgtggggagtgccccagagcccactccagagactaggggagccccctttaattcctcccccaactgattagcagtgcaccatcctgaactgtcagacctgtgactccactggaggctcacgcctaccccgcccatccctgtgctgccccgctcacccagcatcctgctgtgcacactccctttgtcagacctgcatatgtccattctgccaaaccccacaccaccctacctgcctggcagttggctgcgtgcactcccgctgccagaccagcaactggaattgtgaagcaccccccacctctgatgccttgcatgcccggtggccaggagtgtgagttcccatgccacgtggccacctggtgaccagtgacccatgcaccctcaccccatccacccaccaaccagcagtatgtacgcacagcacacaacccagcaaacagtgaaacacttcctatacccaagtcccagtaaccagccaggcagacacatctcctcattagcatcatcagtcacatcctgacaggcgccatctgcacatctgccaaacgacaagcaggagatcctactgccctcatccaacattcatccagctgtaacgctgcacatcccacacccaaacagctcctgcaggctgcctacacttgcactgaaaccacatgacactccaccacctactgagacaccgattcatgcacacacaatgggcctaccccatccatttgggtagcactccctcacagcagatatggacgcatctcttccagagagtgcagtaactgctaacacaaacccaaaaggaccctctagccccacaagagctaggaggtaccatgaccacccaacatctgtcacccgctgccaggcaaagaacctgctgtcccatttccactcaatctggtatgggaagatatatgagcctaacaacagacgactcgcacgtaggtgtgacctgccatacccattagtaaaaggaaatcacgcccagccaacagacaccaccaaagtcacacatagaccagaaccacaaaacaacaacgattaaaataatacaaaggaagaaagacatactaaagagagaagaaacaaagctccaaaaaaatagcacaaaacaaatacacacaataaagaaagaaatatataaacaaattaatacctcaatgcctcagagatagcagatgataacaaatccagtgaagaaacagtataaggttgctcaaacaagtaaacaaaataaagcggcagaaaacctccctgaggaagaaatggtaatagaactacctgataaggaattcgaaagacttatatatgttgttgttgttgttaggtgccatagagttggttctgactcacagcgaccctatgtaccagagaacaaaacactgcccggtcctgcgccatcctcacgatcgttgttatacttgagcccactgttgcagccactgtgttgatctatgtccttgagggtcttcctttcttccactgacactgtactttaccaagcatttatgtccttctccagggagtgatccgtcctgaaaatatgcccaaattatgtaagacacagtctcgccatcctcacttctaagaagcattctggttttacttcctccaatacagatttgtttgttcttttggcagtccatggtatattcaatattcttcaccaacaccacaattcaaaggtgtcaattcttcttcggtcttccttgttcatcgtccagctttcacacacatatgatgcaactgaaaataccatggcttgggtcagacgcaccttagtctccgagatgacgtttttactttgcagcagatttacccaatgcaatccatcttttgatttcttgactgctgcttccaggggtgttaattgtggatccaagtaaagtgaaatccttgacaacatcaatcttttctccacttacattgatgtggcttactggtccagttgttagtatttttgttttatgttgagatataatccatattgaaggctgtggtctttgatcttcatcagtaagtgcttcaagtcctcttcatttccagccagcaaggttgtgccatatgcataacgcaggttgttaatgagtcttcctccaatcctgataccccattcttctttagtccagtttctcagaatatttgctcagcatacggattgaataggtatggtgaaaggatacaaccctgacgcacacctttcctgactttaaaccaatcagtatcccccttgttctgtccaaacaactgcctcttgatctatgtacaggttcctcatgagcacaattaaatgttctggaattcccgtttttctcaatgttacccataatttgttatgatccacacagtcgaatgcttttgcatagtcaataaaacataggtaaacatccttctggtattctatgctttcagtcaggatccgtctgacatcagcaatgatatctctggttccacgttctcttctgaatctggcctgaatttctggcagcttgctgtcactgtacttgctgcagccacttttgaatgattttcagcaaaattttgcttgcatgtgatattaatgatattgtttgataatgtccgtattcgggtttttccagtcagttggccaggaagctgtcttccaaatttcttggcatagacgagtgagcacttccagcactgtatccatttgttgaaacatctcaattatatcccgtcaactcctggagccttctttttcaccaatgccttcagtacagcttggacttcttccttcagtaccatcggttcctgatcatatgctacctcttgaaatggttgaacacctactaattctttttggtataatgactctatgtactccttccacattcttttgatgcttgctgaattgtttaatattatcctcatagaatcctccacaattgcaacttcaggcttgaattttttcttagttcttccagcttgagaaacaccaagcgtgttcttcccttttggttttccatctgcaggtctttgcacatgtcattataatacttgactttgtcttctcgagccaccctttgaaatcttctgttcagttcttttacttcatcatttcttccttttgtttagctgcttgatgctcaagaacaagtttcagaatctcctctgacatccatcttggccttttcattccttcctgtcttttcaatgacctcttgctttctttatggacgatgtccttgatgtcattccacaacttgtctggtcttcagtcatcagtcttcgaggtgtcaaatctattctgagatggtccctaaattcaggtggaatatattcaaggtcatattttggctctcacggacttgctctgattttcttcagtttcagcttgaacttccatatgagcaattgatggtctgtttcatagtcggcccctagcattgttctgactgatgatattgagcttttacattgtctctttccacagacatagtcgatttgattcctgtgtattacatctggtgaggtccatgtgtatagttaccatttacataaacagcaacttatatataggctttgaaaaaagatcaaggaaaacacaaaaaacaactctaaaagaattcaggaaaacaatacaaaatagacaattagaaaccatacaaaagcaacaactagaaatccaggagattaacaataaaatatcacaaatagataacccaatggaaggatacagaagtagaactgaatcaatggaaaaaaagaatcagtgaaatgaaggccaaatctcatcatactaatttgtttgaggaaaaattagaaaaaaagaacgaagaaaaatgaagatagcctaagagttacgtgggacagcatcaaggggaataatttacacataacaggaattccagaaaagtaggaggaaaaaaaaaaaggagagaatttttttaagatttgttggcataaacttccataatatcatgaaagatgagaaggtttccacccagaaagctcaaagaacaccatacaggatagatccccaaagaaagtcaccaagacatatcatatgcaaatttgccaaagccaaagccaaagaaagaattctgagacacagctcgtgaaaaattaacatcacctacaaggagcaccaataaaactaagcactgatttcttggcagaagccaggtaggcaaggaggcaatgagatgacatatataaaacgctaaaagaaaagaattgtcagccaagaatcatatatccagcaaaattgtctttcaaatacaatggtgaaataaggacattcccagaaaaacagaaattaagggaattttaaaaaccagaaatatcaaagggagttcttcagacagagaaccaacatcagacaacaacctgagattaagatacatgacagcagcacctagatatgaacccaaataaagaatttttttaagtaaaataaagctgcaaaactggtaacatggaaccagagatgttaagctgtaaacgatgacaacttcaaaacagagagggggaataaagggtgtagttatagaacttccctatgaaggagatgtcaaggtgatatcgacatataacagactgtgttaaacttaggaagataatggtaaacttcatagtaactacaaagaaaattaatgaatttactcgccaatataaagaagattaaaaagacctagtaaaaataaaatcaccagcaatgaaggatgcagaaagaaaaaccataagcacaaagaactcagcacagaaaattaagtggaacaaagaaactgttaacaccacaaaaaaaaaaaagggtataacaaaatggcaacagtaaattcatacctatcaataattacactaaatgtaaacagtttaaacgcaccattcaaaagacagacagtggcagaatatgacccatcagtatgctgcctacaagagatacaccttagacacaaaggcataaataggttaaaaatcaaaggatagaaaagtatgtatcaagcaaacagtaaccacaggagagcaggagtggcaataataatttctgataaaataagactttaagtcaaaatcccatcataaaagacaaagaaaggcattacataatgattaaaggatcaatccaccaagaagtcataaccataataaatattagtgcactcaatgacagagttccaaaatacataaaacaaactctaacagaactggggaaaaaaaaaaaaaaaaaacagacagctctacaacaaccgtagaagactttaacacaccatttttgatgacagaaaaacaactagaaagaaactcaacaaagatacaggagatctaaataatggagtcaatcaacttgatcccatagacatacatagaacacatcacccaagagcagcacagtacacattcttttctaacacacatggatcattctcctgaacaggctatatcttaggccaaaagcaagcttcaacaaattaaaaaacactgaaataatacaaagcatcttctctgaccctaaggttacaaagccagaaatcaataacagaaagagcaaggaaaaaaaataaataaataaatatgtggaagctaaataacaccttatacttaaagactatttgataatagaaaaattaaagtcttagaatcaaatgaaaagaaaacataccaaaaccttttggacacagcaaaagcagtctcagaggagaatttatggcaataaatgcacacatcaaaaaaagaagaaaaggccaaaatcagtagcttaatcctacaactcaaacagaaaaggatcagcaaaaaaagtccagtcaccagaagaaaggaaattaataaagagcagataaatagatgaaatggaaaacagagaaatagcatcaaccagattaaaagttagttctttgagaagatcaataaattttataaaccattagcccaattcacaagggaaagaaatgagaagacgcatataaccacaataagaggtgacattacaacagaaataactgaaataaaaaagatcttaacagaatattacaaaaaagaaatggacaaatttctagaaacacactacctacctaaactaacacaaatagaggtagaaaatttgaaaagacccataacaaaagaagaaactgaagatgtcatttaaaaacaaacaaacaaaaaactcccaaaaacaaaaatccctggcccagatgactgctctggtgaattctaccaaacattcagagaagaattgacactaattcagctcaaactattttggaacatagaaaaggaaggaatactccctaattcattctatgaagctagcataaccctgatatcaaagccaggcaaaaatgccactaaaaaaagaaaattaaagaacaatatccctcatgaatatagatgcaaaaattttcaacaaaaatcttgccaacagaattcaatagcatatcaaaaaataatacatcatgatcaaacgggattcataccacgggcgcaaggatggttcaacattagaaaatcaatgtacttcgacagaaataaaataatggaaaagaacacatgatcatctcaagagatgcacacagtgtatgtgataaaaaaaattcaacactctttcctgataaaaactctcagcaaacttgggatagaaggaaaattcctcaacaaaattaagggcatatatgcagaaccgacaaccaacattattctcaagggagaatgatttaagaccattccccttgagaatggggatgagacaaagatgtccattatcaccactcttattcaatattggacttgaaggcctagctagaacaataaggcaagaaagggaaataaaaggcatcccaattggaaaggaagaagtaaaactgtctctacctgtagatgacatgttcctatacacagaaaatcccagacattccacaagaaagttactgaaactaatagaagaattcagccaagtgccagagtacaagatcaaaacataaaaatcacttaggttcctctatactaacaaggaggtctctgaaaaggaaatcaagaaaacaataccatttataacagccaccacaaggataaaatacctaggaataggcctaaccagggacataaaagacttacacaaggaaaactataaagcactactataagaattttttttttttttttttttacataaatggaaaaacattccatgctcatggattggaagacttaccactgtgaaaatgtcaatactaccaaaagtgatctatagatataatgtaatcctgatccaaatcccaacaacaactttatatagaaaggaaaaaaatatatatatatagaaaggaaggaggccccaaatagctaaagcaatactgaagaagaacaaagtgggaggcctcacacttcccaatctcaaaacttactatacagccatggtaatcaaaacagcctggcactggttcaatgatgcacacatagaccaatggaatagaactgagagccagaagtaaatccatccatttatgggcagctaatcttcgaccaagggtcaaagttcattcaatggggtagaaatgaaaaaaaatagtctctaacaaattgtaaaggcaaaactggatattgatatgtagaaaaattgaatcaggacccacacttcacactatgcacaaaaactcaaaatagaccaaagacctaaatgttaaacctaaaactgtaaagttccagggagataacagggttagaactaagggacctaattttctgcataaagagcctatcaaacacaactaaaaatgcatgaacaacagaaagtaaatgagatgaatgaggcctcctaaaaattaaatatttatggtcatcgaaagacttaaccaagagagtaaaaaaggaaccgacagactgagaataaatatttggcaataacatatctgataagggtctaatctctaaaatacataggaaactttaacaacccaatgacaaaaagatgaacaatccaatcaaaaactgggcaaaggacatgaacaaacacttcaccaaagaggacattcaggcagctaacaaacacataaagagatgctcattagccattaaacctattgccatcaagtcggttccgactcatagcaatcctataggacagagtagaactgccctacagcatttccaaggagtgcctggtgatctgcactgccaaccttttggttggcagctgtagcacttaaccattataccaccagggtttccctatagccattaagagagatgcaaattgaaactacaataagataccacctcacccctgcaaaaatggcactgatcaaaaaagaagaaaacgataaatgttggcaaggttgtgggaagtttggaactcttacacattgctggggagattataaaatggtacaaccaccatggaaaacagtatggttcttcctcagaaagctagaaatagaaaatgccttatgatacagcaatcccactcctaggtatataacctagagataaaagagtagtgacacagtagacatatgcacacccacattcatgcaaaaagatggaaacaacctaagtccccatcaacaaatgaatggataaacaaattgtggtacatacatacggtggaatactatgcaactataaagaataatgatgagcccgtgaaacataacatggatgaaactggaggacattatactgaatgaaataagacaaccacaaaagcacaaatattacacctgttatttctggtattggggaaggcaatatgtgacacgggggaagtcagcacaacttcaccaaggtaaatgaagacactgaagggtatgcaagaataaaggattatggaaaatgttatacacaattttacagctatgtatgtggttatgtaggtagatatggatacacatatgtgtacaggaaggcatatgtgactaaatgcatgtgcgtgtacaggtatatctgtaggcatatgcatatacacatttgtgtgtgctgtatatatatccacatatataataaaccacatagtgggcacagttataaaggcttcctagacatagcctaacaactcatgagattggtttactgagtcaaaaggtttgggactacagtctcagggtacaattggtgtaacatagctcacaaagataatgttctatatcctagttgggtgagtagcatctggggccttaaaagcttgagaacggctacctaagatataattattggtctctcaaaacagaatataggaaatcaaaggtgcaaagaagaaactagccaacgggactaatagcccacacaagccccagagtcttccaacgtaagaccagaagaactagatggtacccagctaccactacggactgttgtgaccagggacacaatagaaggtcccgcatagaacgggagaaaaatgtagaacaaaactcaaatttctaaaaaggcctgaccttctggactgatagagactagaggaacccccaagactattgccctaagacactctctgaacttggaagagaagctatttctgcaggtcacctttcagtcaaatgatagattggcttataaaataacatcacccatgagtaatgtgctccctttccttaaacaattaactatatgagaccaattggtcaacatttacccaaaagcaatgatggaatggcaaggagaggaagggaagctagatcaatggaaacagaacaaacagaatggaaattgctgacgcattgtaaaaaatgtaaccaatggtacagaacaatttatccattctgccactctctgcctctttatcggtgcatttagtccgtttacattcagcataattatcgatatgtatgagtttagtgctgtcattttgatgtcattttttgtgtgttgttgacagtttctttgttccacttaattttctgtgctgagtagtttttattttcttttcatctttttcactgttgttgattttgtatttgctgagtctttatgttttttttttttttaattttgatgtgtaggactgtagtttcctttgtggttaccttaatatttacccctatttttctaagtttaaaccaatcttttatttctttatattgccttaactgcctcgccatatgaaacacctatgactacatttttttgtcttaatgttgtcatcttttacgtaatgatgtctctgtttccctattttcagtgttttagctttgacttgtttttgtgatttccctacctgggttgatatctgattgctctgtcctgtgttctagtcttgggttgttatctgatgttaccggttttctaaccgtaggactcccttttgtatttcttgtaattttggcatggaacaatctgtataaaaactgttaaaggggaatctaagttgctgtttaagctttcatctaaaacacaataaaatattatttaaaaaataaaataggtctgatggtattcatttcaatggtaaaatacaaggattaaatgagtgtacacacacacatacacatgtgcacacaaacatgcacatacccacacacacagcgtctggaacagtgcctggtacggagtaatgacactgtaaatatctgctgaagaagtggattaacagtgtaattggtagctgcatgtctgacactaaaattcagctgaaaccaccagccatcagccacaagaactggactgccatctgcactaagagacgttaagtattggaatcctttccaggctcttgcataaaaaaaaaaaaattttttttttttttttttgcataggcagatgagtaatcgccaattggtttaaaataaaattattgtccaaactaccccataatttgtttactgcaaatgcccagatgccactaaattgggaccatgctggaacagaacagtcccacagctgatttgtcttacttgtattagtgttgacccggggccagatgtttgtatggagcctactgctggcatttactttcagcaaatgggtaaaatgaaacttgtccccagatgacaggccagacggcaatgaggacagttacccttgctgaattctgttaccagttgtcccacagaactgcacttccctattctgggaaagttctccaaaaacttggcagtttctctctcactgttcacagtggcacctgtgttgcagagctcagggggtgggccagtgcctctgccgagggctgctcaaacaagaatcaccttttcctttatggatggttttagcaattgggtttgtttttttttctttgaatatgttttgaactagcggtaactccacaaagtactttggccgctaaatccttagaatttgctaaatatactttgagagaaaaaaaattataagactaatgttcgatttgtatttctctcagttaaactgtcatgaatattttcaaaagccagatgtcaaaagcaattaaaaacatcaaaccatatgagcacgattatgaggttcttatgagaactctaggaactaacctaacacagccacatcccccttcgatccaggcgcgaggctctggactctggctcctgagcttcagagggctctactctgagcccgctccagccatcaccttccacaagctaagaagccttaggtgtcaagggagcgtcccaacacagagtctgtgccttcctctgcctcattatgttctgggtatttgggaaccaggaatttccttctgagcagcgctgagcctgcttccaggacctgtgtgggcctgtgtgtgcatctttaggggcaaagagcagccaaggagtggcggcgtggggtggggggcggtgggcaggtaaagagggatgccatggattgaatttgtgttcccccaaaatatgtgtcaacttggtgaggccatgtgtggctgtcctccattttgtaattttcctatgtgttataaatcataatccctgcctgtcgttaaaaggattagggtgggatataacactcttgctcaggttacgtccctgatcaaatgtaaatggagtttccctggggtatggcctaaaccaccttttatctttcaagagagttggggaccccgtaccacaaagaaagcagcattgggagcagggtgcctcttttggactcggggtccctgagcctgagaagctcctagatcgggggaagattgaggacaaggaccttcctccagagccgacacagagagaaagccttcccctggagccaatgtcctgaatttggacttttagcctactggactatgagacaataaatttctctttgttaaaggcatccacttgtggtatttctgttttggcagcactacatgattaaaacaagggagcagacatgaaggctaggtgtgtatacgtgtgcatcccaggcctctcatgagaaacgtaatgcctcgcattatgtatctcatcaactagattcgtggctaggtgtacctgttttactttgctttcaatttttatgaatttataaatttaatgttataattatagcaaacatttatacattttaaagccaaagtctcacaaaaatttattcatattaatctaaaaaaactcgatgccatcaagtaaatgccaactaatagtgaccctacaggacagagcagaactgtcccgtagggtttctaaggagcagctggtggattggaactgctgacctttggttcacagccctagttcttagccactgcaccaccagagctcccatattaatctagcttctattgttctctcatcctttattctttctttagccctatagctaaccatattttaaagttttagtttatgtttcctaatacctctactgttatatatttgtttacagttgtacatacatttacacatgcacgtctcactccctccttaaataacatattatacatacttctctctaactggtatttttttcactttctgttacgaatttggtgattatattctacatgaaaataacagggaaatattgattaaagtactgaaaataacctaggggataatctagaggaaacctagataaatattttttgagagttagtgtaatggaaagtatgttagactccataaatcaccatatctgcatctagcattcacttcaaatttgaatgaagatcaatttctcagattttcaaaggttcattaatcaaataattctggaaaagggcatactggtatttgaacataattattatgagattttataagttttagagtgagttggcttgaaaatatatatataaaacaaagttttgtgtcttatgcaaaatgccagagaaacttgtcaaacatcaaatagaacttattctaaatattaaacagacatagattacaaaaaatttttcagtaaactagtgtatatctaaaacactatgtttacttgctccaaagataaagaccacattggagtaaatactgaatttttgagaagcttaacatctattcattttgtagtgtacaaaaggaagaaggtaatggcttaggagtcaaacgggcctgggctgaatcaaacctcagccacatagtggcagtgtgaccttgtgcaagttgtttgaccttgctgggccttattttcccctgtctataaaaaatggtggctaatacttcctcacagtattacaagcagtaagattacatgtttaacacacccagaaaagctactggtacaaggtcaatactcagtacattagctcacttgctcttttgtaggtaagggaaacagaagggagtgtagagtaatggttatgagccagactgagctcgaatcccagctataatacaatcaagctgtgtgactatggctaagttaacgaacccctaacgagccccagtttccccatctgtaaaacagagataagattatcttccacagagagttattaaaaaaattaaattgcatgtagtatttattatactcccaccataagtaagggacattcatctgttctgtttcatcacaatatccctggtgcctagaatagtacctgacacatggtaagttccccttaaaaatgaataagaagtaaatgagataaacacacacatatatcttatgtttaaagagtcattgtaaaagtttcaagtgtgcagatttgctgttttccacgtctcaaagttctctccctgagcatttacacttcgtccttcaccttcccaggttttattaaatgatggatgttctcaccatcaatgtaacctccaaggtcctgccctttcctggattgggctttaggtgcactgaggcggtaactacagcctactactcaattctctactcaagtgagactgcttagaaagtctggatctgcagaatctcaaagccattcaaatctatcagaaagacctgtagggtatttcctgataatgtatcgtgcgctttggtgattgtttctgaaaaggcaatacttgtaagcattctatctgtcacgcatactggaagtatactaaatatattactatttcaccggtaactctcttgacaataatgtgaattgctaggagaaaagaaatcaattcttaaagtgtttctgacatcaaaggtgaccgcagagcttcagcaaaagggttcaaagtaagattgacttgtgtgattgagatattcataggaccaacacaggaaagtaggcaaggcattctttcactgcctaagatacgaggggatgaggaaggtctgattcaaatgtctagtgtgcttagctaagggccttagaggaactgaactccagcaacacgtacctgttagctgcttttgaaacacactgtgaatacacacaccattaggtctgtctttctcattctattctcttaaccaagatgtccgtccttcagttctctatgaaatcttcctcccctacacatgcttcaatactcatgtcaagtaaaccccttccttaactcatagggtttttcttaggtcattgttgctccccatcttatagcaaaaatttaattccatctaacattagattttcccaggtgtgactcttcctctgctgtaagaccctcaagggcaaggaatatgacttaacttatttttgtgccctccttcaccttgcttagcacagacccatgtcaatgttcctgtttttaagactttttttgtctcagtggtgcctgcaaaaaaaaaaaacttactcttaaggcagcagtactttctagatggaaagtttatttaaaaaccaaataaaatacattaacaatgtgaaagatatctggctaaatataatggatcaaaatgctcgaatgccacccacagtgacagctcaatagagagtagcttaaaacagcagtatggaagttttctaccagcaaatcttgacagttctccgtgtgttttacgttatcctccccaccccacctcgttctcatactctgatcattcgtaggtttttcctcttgagagtatcccacataattcttcggctttcttcatttttcttcattcttttttctaattttttctcaaacaaattggtggcaaaagatttctcttcagtctcactagttctgacttccatcgtgtcaattctgctcctgtgaccttctattgcattgtctaattctgaaattttattgttaatattttagatttctagttgctgtttctgtatggtttctagcagttggtttattctgtctttttgttcttgtatttctttgtctgtgtgttccttggtttggtctctcttttgcctgaattcctgcttgatctcttggaattagccttttgaattcttcatcagatagttccattgccttaccttcctctggaaggttttctggttcttcattttctggagccatcttgtcctgcttatttatgtgatttaacattgactgcatctctgaggcatcaagaagttattatatttattgtttatcctgtttgtttactgcatcctgaatttttgttttgtttttatatgttcaagtagggtgggcagctgtgatactatgatcattaatctggtcacattgaagctctcatctcttgtttccaggtgagtggaacagctactatgtgtgtaggctaggagtctgtacaatgttcctgcagggctgctgaggatatagtcagcattttgggtgagtttatgaatttgttgtgctcatcacctggccacaggagcaagacgagttatcttgggttatcaggttgggtgttatatgtgtgccctccgcctgccagttagttggggcacaggtgctcaggtcatcagtcaccacatgtgtgatgtcactgtgtggtaatattatgaaagacgagaagatacctattcaagaagctcaactagccacctacgggagacatcccccccaaaagtcactaagacatatcataatcaaacttaccaaaactaaagactaagagagaatcctaagagtggctaggaataaatgaaaagtcacttacaaaggagaaccaataaaacttagctctgattactcagcagaaaccatgcaggcaagaaggcaatgggatgacatatataaagccttgaaggaaaaaacaaaaaaaaaattgtcagcctagaattatatgtccagtaaaattgtccctcaaatatgatggtgaaattaggtcatttccagataaaaacagaaattagggaaatatgtaaaaagccagaacaaaattacaagaagtattaaggggagtctcctggttagaggccaacaacatcagacaacaattccagactaggatacaggacagatcacccagacgtcaatccaggcagggaattcacaaaaatacaacaaagctaaaggactgaaaatagggatccagagatgtcaatatataaatgaccacaatgtcagaacaaaaaaaggtgaaaaatgagtgtagtcataaagcttccacatgaagaggaagtgaagatggtatcaagaaataaaagactggcttaaacctataaagttaaatttcaaagtaaacataaaggaagctaacaaacttacccatcaaaataaaaagaagaaacacataaacactcagcaaacacaaacaataatgaaagaaatgaaaagacaattcataaacaaaaaaaactcagcacaaaaaattaagtggaacaaagaaaccatcaacaccacaaaaaaatacaacaaaatgacagcagtaaacacatacctgttaataatcacaatgaatgtaagtggcctaaatgcaccagtaaaagacagagagtggcagattaaaaaaaaaaaaaaaacacacatacacaatccatctatatgccatctacagagaaacaccttaggcacaacgacataaacaacctaaaaatcaaaggatggaaaaaatacatatcaagcaaacaataaccaaaaacagaagaagtggcaatattaatctccgacaaaatagactttaaagcaaaattcaccacaaaggacgaggaaagactctgtataatgactaaaggatcaatacaccaggaggacctaatcataataaatatatacgcaaccaatgacagggctccaaaataacaaaacaaactctgacagcattgaaaagagaaacagttccacaataacagcaggggatttcaacacaccaattttggtaaaagacaacatctagaaagaaactcaataaagatacagaagatctaaatgccacaatcaaccaacccaacctcatacacaaaaacagaacattccacccaacagcagtaaagtatatattcttttccaacacacatggaatattctctagaatagactacattttaggccacaaagcaagtcttaagaaaataaaagcactgaaataatacaaagcatcttctctgatcacaaggccttgaaagtagaaatcaataacagaaacagcaaggaaaaaaaaatcaaatacatggaaactgaatacacattgctgaaaaactagtaggtaacagaagacattaaggatagaatttaaaaacattatagaatcaaaaggagtgaaaacacatcttaccaacaccttcaggacacaacaaaagcagttcttgggggtcagtttatagcaatagatgcacacatcaaaaaagaataatgggccaaaatcaaaacattaaccctacaacttgaacaaatagagagcagcaaaaaaagccctcagacaccaaaagaaaggaaataatagattagaaaaccaaaaccaaacccattggcatagagtcaattcagattcatagcaatcctataggatagaatagaactgccctataggatttccaagaagcagctggtggattcaaactcccaaccttacggttagcagctcagctcttaactaatgtgcctccagggcctcaataaagattagagcagaaataaatgaaatagagaacataaaaacaatagaaagaatcagtaagaccaaacgtttgttctttgaaaacatcaacaaaattgacaaaccattggccaaactgacaaaagaaaaactgaagaggaagcaaattatctgaataagaaataagattggtatcaaaagaaacccaactgaaattcaaaggatcagaactgaatactatgaaaaattgtactccaacaaatttgaaaacctagaagaaatggacaaatttctagaatcacactatctacctaaactaacacaaactaaggcagaaaaactaaacagacccataataaaacaagagattgaacaggtaataaaaaaaaaattcccccaaaaaatgccctggtctggacaccttcaatggagaattctaccaaactttcagaggtaacagctcataccaatactcttcaaactatttctgagcacagaaaaggaagaaatactcctgaattcattctatgaagcctgcataaccctgataataaagccaggcaaaaacaacgcaaaaaaagaaaattatggaccagtatccctcatgaacacagatgcagaaattctcaacaaaattctggccaacagatttcaacagcatatcaaaaaaacaaaacatcatgaacaagtgtgattcataccaagtatgcatggaggctcaacattagaaaatcaaagtaatctaccacataaacaaaagaaaagaattacatgatcatatccatagacacagaaaaggcatttgacaaagtccaacacaaattcttgataaaaattctcagcaaaataggaatagaagaggaattcctacacataataaagaacaatttatacaaaactaacaaccaacatcactgtaaatggagaggagattgaaagaattcccctcaagaacaggaaccagacaatgatgccctttatcaccactcttattcaacattgtgctggaagtcctagctagaggaataaggcaagaaaaagaactaaagggcatccaaactggcaagaaagaggttaaaaaactaccttattcacagataatatgatcttatacagagaaaaccctaaagaattcacaagaaactggaactaataggattcagcaaggtagcagaatacaagattgacatacaaaaatcagttgaattcttatataccaacaaaagagaacttcaaaaatgaaaccaagaaaacagtatcatttatgatagaccaccaaggaggtaaaataataaatcgaaaccagggacataaaagacctatacaagcacaaaaaactactgcaagaaacaaaaagagaactacagaagtggaaaaacataccatgctcatggataacaagactcaacattgtgaaaatgtcaatactacccaaagcgatctacagatgcaatgcaattctcatccaaattccaaaagccttctttaatgagatggagaaacaaatccccaactttacatggaaagggaaaggtcccaaataaataaagcattactgaagaagatgaacaaagtgggaggcctcatactatctgattttagaacctattacacagccatggtagtcaaaacagcttggcactggtacaacaacagatacatagactaatggaacagaattgagaacccagaagtaaatctatccatctatgagcagttgatatttaacaaaggcccaaagtctgttaaatggggaaaagacagtctctttaacaaacggtgctggcataactgtatgtccatctgtaagaaaatgaaacaagatcataccttacaccatacataaaaactaactcaaaatggatcaaagatctaaatataaaatctaaaacgaaaacatcatggaagaaaaaaatagagacaatgctaggaaccctagtaaaaaaaattatacacggcataaataggatataaaccatcactaacaatgcacaaacaccagaagagctatctagtagataactgggagctcctaaaaatgtaacacttaaatgctcatccaaagactttaccaaaagaataaaaagagaacctacagactggaaaatttttttctggctacaatatatctgacaagggtctattctctaaaatctacaaaatgttctaacacctcaatacaaagagacaaatcaacccattaaaaaaggagcaaagcatatcaacaaacatttcaccaaagaagacattcaggcggctaacagatacatgaggaaatgctcgtgatcattacccattagagaaatgcatatcaaaactataataagatatcatctcagcctgacaacaacagcgatatggcgcttccttataaagctagaaatagaaataccatacgatgcagcaatcatactcctaggaataaatcctaggaaataagagccgtcacatgactagacatatgtacgcatatgttcattgcagcattagtcacaatagcgaaaagatggaaacagcctaaaatgcccgtcaacagatgaatggataaacaaattatggtacataaacacaatgaaatactatgcaacaataaagaagaacaatgaattcaagaaacacctcaccgtatggatgaatctggaaggcgttgtgctgaatgaagtaagtcagtcacaagaggacaaatattatatgagatcattattacaagaactcaagaaaagttttatactcagaaaaaaacattctttgatggttatgaggctggagaggggagggaaatcactacctagatagtatacaagtgtcaactttggagaagggaaagactacacacaatataggggaagtcaacaccgttacaaaaaaaaaaaaaaaaaacagcagcttgggccatctgaaatactactttattcacttactccaacatttattgagcacctaagtaccagactaaaaccagaagcttatgttctattcagagagacacagcacattacagccccaaagaacatcagcaagaaaaaaagcataattatgtgactaaaggcacatgattagagtctgtgtagaaatcaagtaatagaatattaaaaaacacatcaaggagaaggtgaatctggagggtttttttttttttttttagctaaatacatattttccaagttaagaggcaaaggggttttgggccatcctaagttaattcagtggctacataggccacgtaataatggaattgtaatttgatgggatacagatatttggaaacaccaactcaaccatcaatgtaatgctaaaaaatagtaagaaagtacagaggataaagggagcactaaaaaaaccactttttgaccttctttatggattgtggaatgtgaaaaaggtagtgttatggattgaattgtgtcccccaaaaatatgtgtcaacttggttaggccaggattcccagtattgtgtggttattctccattttgtgattgtaattttatgttaacaaggattagggtgggattgtaacaccgttactaaggtcacatccctgatccagtgtaaagggagtttccctgtggcatggcctacaccaccttttatctcacaggagataaaaggaaagggaagcaagcagagagtggggacctggtagcaccaagaaagaagtgccatgagctgggcacgtactttggacctggggttcctctgccgagaagctcctactctaggggaagattgatgagaaggccaacagggagagaaagccttcccctggagctgaaacctgaatttggacttttagcctactttactgtgaggaaataaatttctctttcttgaagccatctacttctggtatttctgttatagcagtattagttgactacgacaggtggttatcaaatttcccttttaatttgatagaatttcatttatacttctcatccaagttcctctcaggtagaaactcagtggggtgatgatgatcacctttaagaaccccaccagtggtagagcccttatatctgtggtcaagagtgaaatcagtatgaaatataattacttgtaacgttctttcaaacttcactttctatcacagtttatacattacaaaataaatgaatgagggaggagaaaaagtgtcagaccaaaagccagaagacctggcttctagagttgggcacacccagtcaaatggcctcaaagaaatttttaagtttcactgttgtatttatcaaaattatgatattatgaaattgtgaattacaaaattatgatattatactatactctgtctcccatgcataaggttatagtgagaactgaatgaaataatgtaaagaatggttttggaaataatgaaaaaaaaaagaagtgtcatatcagcatttttgtggctcatgttaatatcaatattaacaaaaatccttattataaagcataacaatttgaaatcaccatagtaattacatatggaaaaataaattcatatttgtgttttgagaaaatacacttacatatgaatccctgaagcagtgaccagaacgcaaccactgcagacgacaagtgaaaacctttggtcaggagcaatgtgaaaacaatcctgaaacacaatttaatggaaactacaatatactgctttcgtcagaacccagtagcttcagcatagctcacttcttactttattctcgggaagctctcttaaaagcttgaggctgtttgttagcaacagatgtagacatttataaacaaggaccatcttagctgaattctttttcacaaataaaaggattttttttttttaaagaacagttccaagtgtttacagtcggtactcagagatacactctgcaggaatgccgttcattaaatgtactgcttatgcaaccaagtggtaatcagaacaatgaaccacacactgtggcccatctacaaccacagacagactgatacagatattacctgagggccataaaacactctctgaaagtaaactgtgcccgctgggaagtaaactttcaatgcaccaaattccatttagtgccctgcagaaaggaattctgcaaagaatattccgaaacaggcaactcatcttttatatgtgtgcattcaatcataggaactctggaatggggaatcaggtcttcattctcccaggccatcatggtttataactctaagagtgattgagtattatcaaaattttaaagatccccagaaatgactattgtagaaccaccgttggaagcaaatttctaacataaactcactatctgtaaaattcttccatatgttagtcaaagtctttcctagtacaaggctggttgtatccttctgcttcagtgaagacattcattcattcatgtattcagtcattcctgaacaactaatatctattgaatgcctacctatgacaaaggtcattgtcaggaacgatgtttaagaatagcttccaatttgcagaaaatacagaggacagaggaggaacacattgaatttcttcaagaatatgcaattggcaaaatttcagactgtgggaaatgctctgggttcttcaacagataaattcttcaacagatatacttgaaggaaaaggaaggaatgaaggggaaactgtaggctaaaataaacttaaattttaaaaaattggcaagactaaactgttagggattcatattggacgatgataaactatcaaaaacataaggaagcaattgttataaaagttacaattattgttgttaggtgtcatcaagtcgatcctataggacagagagctgcccctagggtttctagggagtggctggtggatttgaactgctgaccttctagtaagcagcaaagctcttagccactatgccaccaatagttacttacgagaagctggaggctgagactgggatcaggtacctggaggggcttctggcttatgggcagggtttcctttcttgagctggcagtggttacaacggtgttggctttaaaaaactcattaagtcaaacatttcttgtatgtgttttctatatctgtattttatatttcaaaagaaatgcattagtgtggaacaacagaagcttccatgcactgctagtgggaatacaaaatgacacagctactttggaaaacagactggcagtttcttataaagttaaacgtacacttaatatatgactcagtagtcccactcataggtgttttcccaagagaaatgaaaacacaataagacctggacatgagtattcatagcagttttaatcataatcataaaaactggaagaaactcaattatccctcagcaggtgaatggataaacatgtagtgctacatctacacatctataaaaaaacatctatacaacagaataaaaaaccaaaaaccaaaccaattgccgtcaagtcaattgcaactcatagcgacccaataggacagagtagaactgccccacagggtttccaaggagtggctggtggatttgaactgcagaccttttggttagcagccgtaactcttaaccactgtgccaccagagctttgcaacaataaaaaggaacgggttatgatacatgcaacataaccacacttacaaagattcgtgctaagtgaaagcggtctgacacaaaaagtttaagtattttataatttcttttctaagactttctgaaaaggccaaactataagaagagtccatcaatgcaaggggcttgggtgtaggaaagcaactgacaacaaagcagagcaaggaaacttttcagggatattaaaatattctgtatcttgattgtggtggtggttacatgacagcatatgcttgtcaaaagttatcaaactgtatgtctaaaaaggaagtggaatctctgcaaaactgataaaaatataaagcacggaatattgagagtagttttcattaaaaaaaaaaaaaagtccttctacaccctgcatttattttcttataagaaagtgtgggggtgggggtaacacattaggaattatcatttgttgttgttacatgctgtggagtcgattctgactcacagcgaccctaggtacaacagaacaaaacactgccggcttctgcaccattctcacaatcgttgctatgcttgaggccgttgttgcagccactgtatcaatccatcctgaggtgttcgaaaaaaaatatttagaggagagtctaagtcactagtgtttttattgatggtagctgttgcttcagagaaattgtttagaagtgaaaataattctggttgtcataaagttctctctgttcagcttatttcccaaattagttcaaataaatcctgaagtggacaacatcagaggcaaggatgataatggttatgtccactgcacagtatcttaacttccttgtgccagtacagctcctcagtatttaattttggctgtcctcaacagaaatttttcacccaggcctggcggttttctaatattgacttctccagagtcaagtgaccaaaatggacacagtcaaatccggttccacggagcctcactgtgatggcaacatggaaattaagacaggtccgctccaagcactcaaaatagaaagttcactgtcagaaatttcaattaggcctggttgtaacagagtagttatgtttttgcctaataaatgcatttgagtacattgttttctaaaaagcgctataaagctatattgcaatttcatcattttacagatgaggaaattgagacccagaaaggttaaagtacttaactaaagtgattaagctagttagagaaaaaaaagaaaaaacccaatccctttggtgtcaagttaatcccgactcttagcgaccctacataggacagagtagaactgccccatatggtttccaaggagcagctggtggattccaactgccgaccttttggttagcagccaagctcttaaccagctgttccaccaggactccagttagacagatgtggggctgtaaccagatcctagagaacccatttagtccaatagtgtgctttaaaatgaaattatactacactccatgttaatactgttttctgtaccagggatgaataacaggaaagataaactttgtgttttctattcaaccacacatagctcttttgaagagtttaagaagacacatgtgccaatatcactattcatgaagagacggaaatacaaaggaacttccaatgttcactatgtgaataatcaccagggatttgacagtggcctcctttctccccagttttctacgcagttggttttagcctacctttgctttgcataagcgagagcttgcattctagatcgctaggacacaaatttccgacatcaaaagatggcccatattacattaaccaagcattttaaaagatgccatttaaaatattctcttccatctgttgtcattcgaagcaaatgtatcacttgaactaatgtcactttgtcattttaaacttctggtagatttacacaaaggtgcaggtgagaggccccaattttcagaagtctcagccagaaatactgctgatggtgtagaaatagcaactctaaatcaatagaaaattgtcctctatattcattaggaggaaaaagccactcaggagaaccggcctctgtaacatgtgaaagttggaaaagggtctgagagggggacaaatgcagaaagagagcagaagagctctgtgctgttgattgtccaaaggtcaactggcagctcttctcatcttcttctgttctcctaatcccaagacatagagaaaatttcttttaaagtaccaggcagatacagaggcagagggtgtatgtgggtaacagctcagggcatattatcctcttcaacacatgcttctatgcctgcgtctacagctcccaaatgggcagcagaaaatgaaccctaaggttccatagtctctgagagccaatgacgtgcacagcaactagcgagcgagttaagcagtgaaaccatctcaatttacatctccttgaagttcagcgcagaggctacacttgagcacagcaaccaaccatgataggagaaatcccttttacggtaagtaaagaaatagcttcaaggcagcagataacaaggtagggagtgaaggtccgaacaggaacagagagacccggggctagggagtgaaagcctggattccatttgggtggcttttaactccctggtcaattacagatcaccaagctcatttgttgcccttacttagatttgcaccgcctggtataagtgtgagcgcatgcacacacacacacaccaccccccgccccagcatgtcaaagctgcagagaaacactaactgattcatgatactttcagtgtgatatagtttgctaattgtagatagtttaaaaaatatgtcatcccaggtggtgcgtctaccaggttgattctaatttagagctttgaacatattgcagcatagagctgtcacacactaaacacatatattattgtcactattattgccactacctgttatggactgaattgtgtcctccaaatataggtgttgtgaatcctaacccctaaacctgtggaggatccctggtggcacagtggttaagagcttggtggctaaccagaaggtcaacagttcgaatccactagccactccttggaaaccctgtggggcagttctactctggcttatagggttgctatgagttggtatcttctcgatggcaacgggtttggttttagttttatacctgtggatgtaaccccatttggaataagattttctttgttgtgttaattatgtcgtatcacatagggtgtgtctaacacagtcacttttgaggtataaaaggaggagattaggcacagaggcaaggaagcacaaatggagaaagacagatgccacacagagatcaccaaggaagagattctaaaaaagacaagaatcttcccccagagcagacagaaacagccttcccctagagctggtgtcctgaattcagacttctagtctcctaaactgtgaaaaaattcatttctgttcattaaaattaaagtcacccccccaaaaaaaaaaaaacactcatggcatttctgttatagcagcactaacatactaaggacgccatccagtgattaatttcatctgattctatgcatgcctcagcatgatagcccactaacaagcataaaaccaaaaaatctgaacccactgccctcaagttgatgccaacttatagcgaccttataggacaaaatagaactgccccataggatttccaaggagtagtggtggctttgaactgctgaccttttggttagcagctggagctcttaaccactacaccactagggctccctaacaagtataacaagcataggtgtcctgaatttagacaaattttcacttcatttcatttatagctatactgttaacacgttgtttcactcatatatgtaggtaaggattctctatctctagtccacaggttttgaggatgcatactctgtttcatttatattgtctacaaaggaaatgtgagttattgcctaagaagaacagaagctgtcagtcataatctatacattgattagattgcctccaaagggaccaactcaaacacaagtataagccacgtctggtttgcatggcttgcatggtaccagcctataaaataaaccactgttattccacctccacataccccacttggtttggagacaatgttgctgaaagttctcaaaatgttcctccaggttagtctattgatgcttaaaacacatccttaactcagcgtggagtaaggaggctgggggttcagcaatgaaccatctttgctcagggtggaagtcagcgccatagctgcagtccacaccatgaaccctggctggctgaacagtcacaactcaaacaagtcattacagaggtggacaggtagggacagttatggaatagtggatggcatagcataaagctaacaccactaaaatatgtccagtcatatataccacacagatgacaggtaaaacattgttcatcacatctggaaagcatctttgatttacatcaccaactaacaagactagcacaggtagcccttatgatgttacctgcctctaggcagcacccattaaagtgctctctccaccgtagagaagggttaatttggaaatatcttttctcacctctgcatttagattataggatgttaatggcccgaaccaagttggttatgcttgtttaaatcttcctccgggcaggagatttctgatttatgcacttacagctgattatgtaacctctggctgcatctcttcatggttactgcccaatcttgggaccattgctaaccattatactctccctggacatgaggtcaggggaggggagggactgtggaggaaggtttggtggtgacataaatgaaactactcattcaaacgtttttacagttttttttatcatctaagtgatcccattactcatcagagtacagacaatcacgcatgttcaggtttgcctggtcctttgagctaccagacccatcacacagctgaaaaccaagcccgtcctacctcccctgaattactcatcctgacagctgaattctactttccacgtatgtctaattgtctcagattctaagctcatcattcactttcccctccactgtctcactcattcggaaatctgaaattcagaacatccttaaccactgtttagacactctcatggctaccaggccatcaaaaactccaggaagatttcacccaactcaccgagccctcagcatcttatgcgtctgcgcccacattcgaaaaagacgtgtaagagtagcagcctttgtctggagtccctggatggtgcaagtagttaatgtattcagctgccagctgaaaaggcggcagttcaaatctactcggaagtgtcatggaagaagggcctgatgctctacttccgaatcatgagcccctgaaggaacactatatggagcacagttctacagtaacacacacagggtcgccttgaggaagaatcaactccacggcaactggtttagcctttgtctaggaaatgaaaattagatatcctcttgtgttttcctttttatcttggctgccaggaatctttgagctaaattaaatgctccttctcagaaaacatgttggcctgtgtaaccgggattatttgccacattctccttctcatggccttttagtttgtctatatgatcagccttattgtaaacctatcttttattgtaagccgtttcatatccattaagaagtaagttgagagtttaatttttaaaaataaccttggtccatgaacaacgctcaaataattctacattccagatgtcactacacataaaaaatgaattcattggcccagggggggaaaaaaaggagaaaattatggacataaatttttttaatttaatacaatgacttgggctatataaattacttgtaggaccatttggatgcagaccacgtacagtgcaatgtattacaggcatattccgcaatactgagaattttacaaagacctaaattatagtaacagaattatttaaataagcataaccagaaatatctttaaaaccagagcttaaaatgcgacaggccatcaggaatggttcagtaggtctacgcaacttattatgtagttgtcttatctgttatatcagctttttcttccctatcttttgctgatttacattagttgtctggctataactggacttgaacttttcagtttcaatgaagctttacgggagtaaactgattatactgggaaaaaaaaatcatccccaaagcagtatgtaaaacagaccattatttattttccatataatcatcttctcttttcagcctaggatctagacttgtctcctggacaactcaaacctgtatgggattgtcatctgatttacaacaggtgacctggcatcatatgaaaataatttactgtgccatgtgtctcgtgacctatgaatcgatagcttgaatacagagacgtctcaattagtcccttctccttgtccacactgttaaaagagaaaggattatgaagtagtgcttgttttaaagttgcttttttcaggtggggcgatctattacttcaagttgggagccacaagacaagagttgtcatcaaactgaatgaaaaaccatgcataaggttatacaaataacagccttcgaggggtgggccatgcatttgttagagtattgattggcgcatgtatattatcctgggcctatgtattattctgggctcaggcgttctgacggggtgttaaaatatgacactgaacacagagtagtaatccctccttcctgtcctattcctccaagaagcccctaaaccaaagtcacaaaagttcatggcatggagccaaagtgaggtaaataatctagcagctaagctttggcctcgccctccaacacatctaaaaaggaagctatcactacaaaaggctcttagtgaggaagctacattatccatcatcaatcatatgtcattgttgttgctggctgccctcatgtcagccccgactcatggtgatcccatgcacagcagaaacactcgccaggtctttctttctagtccgtcttagcctgaagctaccctgaaacctattcagcagcatagcaacacacagacctcccatgacagatgggtggcagctgtgcgtaagttgcattggcaggaatcaaactcagttctcctgcatggaaggcaagaatcccaccactgaaccaccaatcacacagatacgcaaaccagtctgaatggtaagttaaagacaagtcccacactctgagctgggagagcagctcattaagattttaaggacacttttcaaactagactctgactaggataagctagcgagggaaaagtgaaatgaaaattttttttcctgatttagcaaatggcgaaggtagaatgcagaaagaaagtaggctgtctctcacaggatgcctgtatgtggtcccaggtctgtaattgggaagtgtgtgtttttttccactgaattggatggatattaacgtaataggttgagcttccatctgaccctatattaactataattggaagctgaaagattcagactgtgctagaattaaatctaaagagagctgcttttttcagaatcctttcaaattctagttatcaaaggacaggagctcactgattttttttttttttttttttttttgctacttcgaaatgttttctctaagcaatgagtaagagcttactatacgattgaattcattttctctctactttaaaataggattatgttgacctgtgaaagctcatccacctacctggcctctcagagaacattctaacaggtcacaaagccactgaaacccactggaagacccttgggaagccatcaagaagaaaagacatccaccctcagtaaagcccaggctagatcaagggcagacagaaagtttcagaaaactggtccaaatacaataggatggcttggctagaaaccccccccaaaaaaaaaaaacccaacagctagaaaagaagatctaaactgctgggaaatgagctcatcaaacgcaacagaatctttgcacaatggaaattcaatcaaaggcagtaccgctgcaggaagggatgcaactcatggcgcaacatgcgtatttcgatacctggaaaactgctgctgcaggccacgcatctgaatcctgttgcgctcagactccagggtcacctcctgcaaccgctgttcactttgaagacgcaagtgtctctcttcttccagttcatgtatcagcttctcatgctgtaagaggtacagaaggaccaacataagaagatgtttcttgaatgttatgacaaaaataaatagtcatagttgttattttgtgctaacttgggctctacatatactaattcatttcaccttcctaaaaattgcatgagataggttctattattaatttcttgttatagacaaggaaggtcgctgggtagtacaaacagtttgcactcagctactaacctaaaggttggcagttcaaacccacccagcgacaccacagaagaaaggcctggcgatctgcttctgtaaagactacagccaggaaaaccctatggaacagttctactttgtaacacatggggttgccatgagtcagaatagactctacagcattttttttttttttttaggacaaggaaaccaaggatcagaggtatttaagtaatctgtgcaaaattgtataaaccacaaggtaacagattctgaattcttgctgatccgtctccagagcttaaacaatttccactgagctaggtgccttcctgtgaagaactatgaccccgtaatactatcaaatgcatagcaattcaagtaataactaataaagtcattatgacctattcagaattagttcacctcttcaatccctgctacatgctttaaaggacgcattactgtttttatagaagagctgggaattctaggttcattagaccatggagctgatgagaacaaggttaaagaattcatttttgtttggtgagttagattttcacagataaaaataggtcaaaccgcctacagtatttataatccccgaaactagctcatctcaggaatgggcatcagggattaaaagtgggaccgggtgacccagaacagatggttcagcacaaactcattcctggatctggtaaaaagcacacagctcagatcaccctgataatactgacttagctatgctaaggtcttttttgttttattgttgctattactttttttctttgtgaagcatgtcatgttgctatggttattgctgttactgaatttagcgctctgtatacaggagatacataatgtgatgaaaaccaaagatgcaatgcctgactataagggacacacagtcttaaaggggaaggagggaagtgaagacctctgtctggaaatttctcagacactgcgaatgtgtacgatgggttacccaggctcaatatgattcactgcatggggcaaattcacagcaagagatagctaagggggattttctccagctctgtcaaatgggaaaagagggcaatgaagaaaagttttgactatgatctagaagtaagtcatgatcctctaaaacacttcacgtccctgcctctatacccttgaccctgctattcctcctacttgaaaagccctctaaagtctctgccttcaaagcctgtggttcctcccatgctcagctttaacccatttcctctagaacttttcctcatcacgtccttgtcctctctcttccctgagttccaaaggcatgtagcatctttacgaccctgtaggaccttacttggaaaccctgggtggtataaaccattaaccgcatcggctgctaactgaaaggctggaggtttgtgtccacccagagatgccttggaagacaggcctggccatctacttcaaaaaatcagccattgaaaactccatggaacacagccctgatctgacacatatgggtcaccataagtcagagttgacttgacagcaactaatttggtttgtttttattttccaaatatggaaaaaccttttctacccaaattataaaatatgacataagataacaagaaaaggcaccaactgataagccaggatttttttgtattaagtgtatcatggatgatacaactgttttgactcaactactaacctaaccaccactggtgctcatgaagagcctgttcatagaccaagtggcagttggtcagacagaataagggtatactgcatggtatatagttaggaaatgtgtgcatcagggctgtatcctttcaccacacctattcaatctgtatgctgagcaaataatccgagaagctggactatatgaaaaatacagtatcaggtttggaggaagacttattaacaaccttcattatgcagatgacacaaccatccttgctaaaagtaaagagacctcaagcacttgctgatgaagatcaaggactacagccttcagtatggattgtacctctacataaagaaaacaaaaatcctcacaactggaccaataagcaacatcatgataaacaaagattgaagttgtaaaggatttcattttacttggatccacactcaatgcccacagaagcagcagtcaagaaatcaaaagacatattaaacattgggcaaatctgctacacaaaacaaataaataaataaaaactcttaaaagtattaaagagcacaggtgtcattttgaggactaaggtgcacctaccccaagccatggtattttcaatcacctcatatgtatgtgaaagctagaatgaataaggaagaccaaagaagcgctgacgcctttgaattatagtgttggcaaagaatattgaatataccatgaactgacaaaagaatgaataaatctgtcttggaaaaagtgttaacagcatgctccttagaagggaggatggtgagacttcatttactatattttagacgtgtcagcaggagtcccaagagaagaacaacatgcttggtaaagtagagggtcagcaaaaaagaggaagactctcaacgaaatagattgacacagtggctgcaacaatgggcttaagcacaacgattacgagaatggtgcaggaccgggcagcgttttgttctgttgtacatagagtcactatgagtctgaaccgactcgacggcgcctaacaaaacaataacctaaaggttggcagttcaaactcacagctgtaccatgaaagaagaggcctgggaatcttcttctgttaagattacagccaggaaaaccctatggagcagttttactctgtaactttatggggtcaccctgagtcagaatcaacagcaactaaaaacaacactaaccaaaaggctggcagttcaaacctccccatgggcagagtgaaagaaaggcccagagatgtgcttcggaaaagattacagtcaagggaatcctatggagcagttctactctacacagggttgccgtgagtcagaactgacttcatggcaacaggtttattttgttttttacaccatgggtgtaaatcaatctgtcccaaaagtaaattttaatttcttacacaggcttttcctggatcttttacagcgggaagagtgaaaggaagcgagacatggagaattggtaagtgtcatttacatggtgccactaaggtactcaagggtaagagccaaaacaatgacattgaaatctgggtaatgaacctgaagaggccaagcttctgcagcaacatctttttccaccaaactactggggtgaaatgactttaagaagccacctttgtagaactttggtagtgtctctcaaaacccattaggcaccacccatttctatttctcccagtttcatttagcaagatcatctcttccctttctccttcactgggtcctctttctgttgcacccaaatcactacccccgggagtactgacaatggcccaacgttcccaggaaaggtgaacctgccacattctcttccttcgtttacacactcaggctttgctcttcttcaaaaagtagcttttcgtacgttcctgaacaaacgctggctctgaacaggtgaattttcaactctgtcttctcctttagctgctctctaactctgaaataagccaactatgtgagaaaaatcttcaacttggagagtacgtcccagtttacaacatgtttctacttccactggtgtatctaagtcctcagaacaacttagtcagttggtattatcacctccatttaaagacaaagagagtggagtaaaaggagggggtaagggggagggagcttgccaggtcccactcttagagaacgataaccagaagttaccaagtgaagagaggggacctgcactcctggcagagtgagtggcaagtgcgaagtccttcgtcacattttggaagaactaaagaaagcccagtgtggctagagcccagtgagcaaaggaacacgagtggcatgtgacatggatggaaaggaggcaaggggtggaacacgggggaccatcaagatcctattaaggatttgggactatcccaagcaaaatggaaagttctttactaaggtttaagtaagtgggtgacaccatctgatgaacattttgcaagcattattttggctactgtgtgcagaaaaggactgagttaaagaagctgcataagcagaatgagaaaacatttcaatagaagctgtgtctaaattgcacagcttactagtcaagtagttttggacaagcaacttaaaacctagctgttttaagccaattttctctgtaaattggggagagtgaaatcttccatgccaatatcacagtatcactgtgaggcccaaacaaaataatgcatagaaaagcactttaaaaactaggaagtccaatataaaaataagtcatggctaaccagaataatacagcttatattgtctaaggtttttttcagctagctttgataaattctagaaaaatttaaagactttaaatatatactgcatgttaaatacatgctatatatttctttgaaaaagcgcaattttttttttttttttttaagatcaaaccttaatatgggtggaaaatgcaagcatttcaatgtaagagctgtgagactaaattaatcacagatggcatctagaacatatataaccctgtgtttggacttcctaaaagacttttttttaatcccaccaccttgtatgattttaaacagatggcttgatgtgtgatgtgccaaatattcaggggaaagttagaatattaacacttgctttcaaatatagaaagtcaataaaacctctatcccaggtctaattatatttagcaattccagacgtatcagtgggtgatgatacaggctaagtgagctaaagaatacttaaagaatttggaagaggaacaaataattttctttattagtatagaaattctagtgccaccatgcacggtcacgggataggtgaaacagccaccataataaggccggtgctttccacacattctccaaatactccaggcgagtcctgcataatgagtatcatgaggcattagtttatcttgatgtattctgtgctgactttgacacagaaaagatacatgataatatatggaatggtattaactatatgttttctctttcgaaagatttcctgaaatgtgttcaagtcataatatcaacattcctgtcatataatattttactgtcaaaaatcatgggcaaaaaacatgaacactcttggataatgaaaggatcttaaagatagtgataaatgaacagaagccattagaaaaggccacaggaaggaaacgattttgctggtattgatggaaaaatatatgagttcactcaagaaatgtggactctggcaaacaaccaatatactctgcaacggggctcgtaagttcaacagaaatttgaaaagatgagtacatttgattcaatgatacaaacataaagcatggcattaagactcatcaattcagaacttctaagtccacttacatttattaattggcgcccagtcacatacaccatgttttccaaccttaacatccgatgtatatgatacatcttcagaattacagagacccagaattactctcctgctatctattgagaatctaaaattgacaactcatttttttttcttcacaagctcataagccaaacacacaaaagcagcaaagttagactgtaatattttcatgaaaactacttttttaatggaaaaattgtataccaaccaatttctatcaacccaaagtaaaatgggtctaaattaaactatagttattatacctaactgtagcctcatttttattttttatacatattgcaatatgttttccccataaagctccctggaatagatatccccattagttatggaagattcggttcttctggaagcagagaagcagataagaaacttaataattgatttttttttttaaccagtactgttggctgtaacaggagaatcagaatcagattctgagatgcaggatagaagcatcccagcatatatccgcagcgctgataacaacgcccaagagagacaaagcttttattctaactaaaaaagatacgaagcttgctttaaaaaaaattgtgcaaggagggaggaaggagtgaaggagaaataaaggagagggcaaggagcgggaggaagatttcaagggcacagaagacagatgggtacttgggtggatcttaaagatgtcttctgcgagacagaagctctgtaagtgccacaggtgaatcgagccatgcgattacattttctgggcaaagatcatgctatgtgtttattactgagcaaagaaatagagatgttaatttatggaaggaatatttccagaatgggttgtgcaaaaagaaaacacgataatgaaggtttggcatgtcaagatttatgattacaaaggtacgttggaaaaaaattagaagacattacagtatcctacaaagatagaaaactgagttgcctttttttggtagtccgggatctttattacttatcgactagagctataaaaaaaagtcaagaataaaacggtagtattccattcacagcataaactaataccgttttgattttattatcactgtacagctggaaaaaaatagggtggaaagttacctactggcccgctgactgtattttccatcagcttcagtgtcttaatttttaccatcatcattcctgtggtggaaaaagcgtgaggctagtagtcaaggtaatcaccttggtcgcacattaacttgctattcaactttggggaataaacttattctctctgcaccttcccaaaactctaacgtcctttcccactctcacaattcatgcatccatgaaaattaaccatgaccacagcaagaagcgcatcccactgatggtattcacggtgtaatgagataaaacacacaaaagggtcgaagtagtagcatcctcaaaaacagcttaaattcaggcgttataatcggaatcaagaccagcccaaggctgactcccctgaggtggagatcaagcatacctccactctccaacctttttaccaattctgacaccagccaccccttcccacagcactctctacttctcttttgggttcgataatccactgcattggacacacagaactcagaccatacgtacagttaagcagtttataaaggaaataacggggtacaacttggaatcaggatcaacaggctacaaaattcaggatcaggaagcatggaggcagagttttccttcttcagtgccagatagctctctcagctcctcttggttatgcaggtctcctctcggctctctgaagacaggctcctcttggttatgcttcctgtcactgccaactctgccactgggcccctactgggccttggtcaagttacagctcttttaggaggttccttgactcctctctctctgcctttttttttttttttccttcagtttcttcctgctgcttctcttcctccttctttctgtctccaaaacctctgtgaagctagccacttaaatacacaaagtccttgtcaatgtcaaggcatgacactcccaccagggccatggactgaccaatcccccttcgtttgcatagtaggcaggctgggctacaactcacctcatttgcatagtctactgaccaatcccggcaaggtgcatatcaatcacaaggcaggctgcagcccaggaccagacatagagtagcaaaactaagttgtttgcagcttatccaggaaatgtcaatcaacctggataaaagtaacaaaccctgtggagtagaataccaggacaagggtaactcctcagggcttagaggaaaaatctctcaagctgtttttccaaagaaccaaggcaaaaggcaacataaaggaactcattttaccataaaacataatgtctggaagatggtatgtgtgtgtcaatgggtatatgttggggatttctcatagtatggatttcatgtgacaatgataagggtgactggcatctcttgaataagtaattgggtgggtgaagctgtaggcttaggagctggcacctcaggaagttaggctaagggcatggataaaaggttatcttggctaatacaaagcaggcaaggcaacattaaaatgatgacattggacattaatagtactgggaagagagacagtgaaataacccccagaggcactggctttaatatggttcccaaacaagtgcagttctcagtagatttgaagagaatgacagaatctaaatgatgcttgagcaagataattcttccttagggtggactccagaagtcagagactacagtaatagggataaaaggcgattgcttcctttttatgactgtcattcattagcagtggctccttgagttagaaaagtcttcccacagtgttttctggcttgctgactttctaattttgataaacttctcattttttttttttcctcagaaaaaccatttcctcctaagtcttggaaaatctgatgatttgaggggctgaccaaggaaaacaagagactgagtaataagccaggtaggtagtaagttggtatagatagccagctttctaattcagacatgctgttccccttgcccccgtttttccctggagtatacctggttaaaagacactgttctccactttgcttagaaaatagcttaatttacctgaccaatgatgggtccttttttaagaagtcaatgactcattcttccctggtccgagatctttctcagttgtcatattaattgatcacaattaacagcagctattaattattttatcccctgcggggtattgagaagtcaatttcattaagtgtttttcttgattgaagtcttatgctttctttcattttctgttgagacagttatttcatacagggaaggtacagcattttagttcacttagggattttatggaaacctggtggcatagtggttaagagctacagctgctaaccaaaaggtcagcagtttgaatccacctggtcctacttgtaaaccctatggggcagttctgctctgtccaatagggttactacgagtcagaatcgactcgatggcaatgggtttggttttgatttttttaagcgctttccttccaattcttcatctgaactatctacgtactttagagtagggctggatttatttataccccactttactcccctgctgcccgcccccccgccccagaaaccctggtggcgtagtgtttaagagctacggctgctaaccaaaaggtcagcagtttgaatacaccaggcacaccttggaaactcttatgggggcagttctaccctgtcctacaaggtcgctatgagttgaaattgactcgatggcaacaggtttattttattttgtttttggttttcactccctatttctcttctgtctttaccccacaatgcccagtgtaaaatgaatggatccccagttgactcagattccactgcaaactttgagcactatattcctctttgctccttattacacagcattctgagatgttttattctatcttctacactccaatcctgacttcagctatctttgctatataggttaatgcttcctctgccttctctaacctcacgtctctcttccttcactgtccaagtagttcataatttatctcatacattggtgctcttaatattcaacttagatttttttttttttactatataatgacaaatacatcactaaagattttccccatatatggtgctcttaatattcaacttagattttttctttttttttttgctatataatgacaaatacatcactaaagattttcttattgtccctcaaaaggcaaatttttctttaggtaaggattaagtcttaatacttggtaataaaaccccatagaatattattagcatattgctgtattccagaactgttcaataagtacttgttgagttaaacggaatcctcttgacctcctacttcttcctttccctgacttggaagtcagctctaggtttacaaagtgtgtatcaacagcaactttcagtcttcctcatgatcctgcttctgagaataatgtgattacgtcttctttggtttaaaacctccatagccacatttcaccctgtttgtcattttctttccctttgcttggccttctgtttggccttataacttgccctctcctggcagcccatggtggtagattataatcccaaacctagtatttaaattccttttctgataagtctctttcacttgtagctacccactgccatctagtctattctgactcatagccagcctataggacagactagaactgccccacagggtttccaaggagtggctggcggattcaaactgccaacctttcagttagcagctgagttcttaacctctgtaccaccagggctcccacttgtaactactacaacaaaaaacttcatcttggaagatttgcagtggcttcctcacaaagcatttataattctgttttttaagatagcatattttactgttttttcttttcaccctacaagatttgtagaaggggggaaaaagaggcctattcagactaagaatctattttcctcatgattggaatccttatattcctgtctttctacagtgaatgggggtaattatgtatatgggaaattagagtatttgctaccataattattcactcctctaaaagagacaaataattataatgtcaacaacagactgtaagaggtaccactgcagctcgtgttttaaacatgccaggtaaatggcttctaggacctcggtaattaatattaatttctgacagatgctttttaatcatttggaaacacactagaatgtcttcacacttcccatttcattgtataaaagtctccggatatttctttaaacaaagtcctaagagcatctggattggctgttccataggcacaagttgtcacagcttccattattttattataccagactacatgagaaacccaaaatcttacaatatggtttttaacagtttcccttatccttgttagcaaataacaactttcacattttatcattccattacagattcaaatagaatatttaaagatcaatgggaagctaatcacaagatttggttcaatgctttagtaattaatttcatacaattaccaaagtcagaagcaattgaaaatattacatattgaataactagagtttgtattatttctaggaggtaaggttaaagagaaatatcatttttatgggaaaatcattaaagacctataaatgagctgaatgagcataattaatctatagaaagggaaaatgtatgttcttaaaagacagatctgagtacctcttttaaaagtgcactaaacctggggaggcagagccaagatgacggaacagacagacgcttcagtccagccctctttacaacaaagacccgaaaaaacaagtgaaacgagtatatctgtgacaagctgggagccctgagcatcaaaagcaagcttagacaatgaactgaggggcagagggaggaagaggccgttcagaagtgcagaggagttaccggacctgaatcacggggagccctcaggcaccattcccagagtggtggtggcggaggtggctggctggtcctagcgctcggccgcagtagcctcagggagaagcagccagccacacagcccactcacacctccggaacctgaggagaaaggcgctctcgacaaagtacttgcgtatattttaccgcacccccccacccccaacccagcttcagcggctgaatccctaggcctgaggtagactctggtgaacacctggagccatcctcccggccttggggaaggaaaaaatttgcaaccagcggagagctcaggacagaagcggctcctgaccaggcataaaccgtccatggaccttgagcacttttcccctcggcatcgacctgtgtggaactatttctggagaatagacccttgctggcaaactccaaccattttagttgtgtagttgagaggtgggtgtttgacatttgacattgctttgcctattaaacaaggtcctcacctacccacatcagggacctaaggactggtagctccactcacatcacccagccacccgcaacaggggtccaaagataactggtacctcccagtccttacaactaaaaactttggatgcccaaggtccttttgcagaacccaaccaccagcacactctagggaacagagacatgttttcctcagagatacttgggggtcggttctcagccccctgccttgttcagagcgtgaccctctgctgcaatcagatactggtatatatgccaatcattcctgcccctctaagactgtaggacagagcctgtactacacacttgatgtcagctacctggtaacctgagctgaattcatacaagaaaactaaatggactcctagactgatatacctgataacagctccagccaggtggggacaggacaccagagctccaaaggtgaaaataatccagctagctcactcaagcaaaccataggggtataacaaaacaaaacaaagcaagcagctatgacacactaagcaagcataaactaatacaataacttatggatggctcggagacaacagtcaatatcaagtcacataaagaaacagaccatgatcacctcaacgggctctcaaaaaaaagaatccagggatcttctagatgaaagtgcactcctggaattaacagatgcagaatacaaaagtttaatatacaaaacccttcaagacatctggaaggaaatgaggaaatatgcaaaacaagtgaaggaacacacagataaagcaactgaagaaattagaaagattattcaggaacataatgaaaagtttaataagctggaaaaatccttagacagacagcaatcagaaattcagaagattaacaataaaattacagaattagataactcaatagaaagtcaggggagcagaactgagcaagcagaagctagaatttctgaacgcaaagataaatcacttggtactaacatatttgaagaaaaattggataaaagaatttaaaaaaaatgaagaaaacttaagaatcatgagggactctattaagagaaataacctacaagtgattggagtacaagaacagggagggataacagaaaatacagagaaaatcgttgaagatttatcggcaaaaaacttctctgatgttgtgaaagatgagaaaatatctatccaagatgctcatcgaaatccacataaggtagatcttaaaagaaagtcacaaagacatattataatcaagcttgccaaaaccaaagatatagagagaattataaaagcagcgaggcataaaagaaaagtcacttaaaaaggagagccaataagaataaggtcggactactcagcagaaaccatgcaggcaagaaggcaatgggatgacatatttaaaaaattgaagggaaaaaaactgcctgccaagaatcatatatccagcaaaactgtctcttaaatatgaaggtgaaattaagacatttccagataaacaaaagttgagtgaattcttaaaaaccaaaccagaactataagaaatactaaagggagttctttggttagtaaatcaaaatatcaggtatcaacctaagactagagcactgagcagagcaaccagaagtcaacctagacagggaaataaaaaaaaaacaaagcaagattaaaaaaaaaaaaaaagcccaacacagggtaacagtgatgttattgtataaaagaagacaacattaaaataataaagagggactaagaaatataatcatacaccatctatacggagaggaagatatggcaatacaaagaaataaaagttagttttaaattgagaaaagtaggggtaaataatgaggtaaccacaaaggagacaaactatcctactcatcaaaataaaatccaagggaaaaatacagactcagcagaaacaaaatcaacaacaacaaatatgaggaaaggacaatatataaagaaaatctactcagcacataaaatcaagtgggaaaaagaaactgccaacaatgcacacaaaaaatacatcaaaatgacagcactaaattcatacctatccataattaccctgaatgtaaatggattaaatgcaccaataaagagacagagagtagcagaatggattaaaaaacaagatctatgctgcctacaagagacacaccttagacttacagacacaaacaaactaaaactcaaagaatggaaaaaaaaatacaagcaaacaacaaacaaaaaagagcaggcttgggaatattaatttctgacaaaatagacttgaaagttaaatccctcagaaaggataaggaaggacactacgtaatgattaaagggacaatacaccaacaagatataaccatattaaatatttatgcacccaatgacagggctgcaagatacataaaacaaattctatcagcattgaaaagtgagatagacagctccacaataataggagacttcaacacacctctttcggtaaaggacaggacatccagaaagaagctcaataaagacacggaagatctaaatgccacaatcaaccaacttgacctcgttcgtagacatatacagaacactccacccaacagcacctaagtatactttcttttctagtgcacatggaatattctctagaatagaccacttattaggtcattaagcaagccttagcagaatctaaaacactgaaatattacaaagcatcttctcggaccataaagccataaaagtggaaatcaataacaggaaaagcagggaaaagaaatcaaacacttggaaactgaacaataacctgctcaaaaaagactggatcatagaagacattaaggatggcgtaaagaaattcaaagaatccaatgacactgaaaacacttcctatcagaacctttgggacacagcaaaagcggtgctcagaggccaatttatatcaataaatgtacacatccaaaaagaagaaagggcccaaagcaaagaattatccctacaccttgagcaaatagaaagagagcaacaaaagaaacccacagacaccagaagaaaacaaataataaaaattagatctgaactaaatgaaatagaaaacaggaaaacaactgaaagaattaagaagaccaaaagctggttttttgaaaaaaatcaacagaattgataaaccaccggccaaactgacaaaagaaaaacaggagaggaagcaaataatccaaataagaaatgagatgggcgatattacaactgacccaactgaatttaaaagaatcatatcagattaatatgaaaaactactcaaatttgaaaacctagaataaatggatgaattcctagaaacacacaacctaactaaactaacacaaacagagttagaacaactaaacagacccatcacaaaaaaagagattgaaaaggtaatcaaaaaactcccaaccaaaaaaagccctggtccaggcagcttcactgcagagttccaccaaactttcagagaagagttaacaccactactactaaaggtatttgagagcacagaaaaggacggaatactaccaaactcattctatgaagccaccatatccctgataccaaaaccaggtaaagacaccacaagaaaagaaaattatagacttatatccctcatgaatgtagatgcaaaaatcctcaacaaaattctagccaatagaattcaacaacaaatcaaaaaaattattcaccatgactaagtgggattcataccaggtatgcagggatggttcaacgttagaaaaacaattaatgtaatccaccacataaataaaacaaaagacaagaatcatatgattttattgattgatgcagaaaaggcatttaacaaagttcaacagtcattcatgataaaaaaaactctcagcaaaataggaatagaaggaaaattcctcaacataatacagggcatttatacaaagccaacagccaacatcaccctaaacggagagagccagaaaacattcccattgagatcgggatcagacaaggatgccctttatcatccttgtgctggaaaacctagccagagcaattaggctagattaagaagtaaagggcatccagataggcaaggaagaagtcaaagtatctctatttgcagatgacatgatcttatacacagaaagccctaaggaatcctccagaaaactactgaaactaatagaagagttcagcagggtatcaggatacaagataaacatacaaaaatcagttggattcctctacaccaacaaaaagaacatcgaagaggaaatcaccaaatcaatgccatttacagtagcccccaagaagataaaatacttaggaataaatcttaccagagatgtaaaagacttatacaaagaaaactatagtatacttctgcaagaaaccaaaagagacttacataagtggaagaacataccttgctccgggataggaagccttaacataataataatgtcaattcttccaaaagcaatctatacatttaatgcaattccaatcaaaatcccaatgacatcctttaatgagatggagaaacaaatcaccaatttcatatggaagggaaagaggccccggaaaaataaggcattacggaaaaagaaaaacaaagtgggaggcctactctacctgattttagaacctattgtaccgccacagtagtcaaaacagcctggtactggtacaacaacagatgcatggaccgatggaacagaattgagaatccagacataaagccatccacatatgagcagttgatatttgacaaaggccccaaatcagttcaatggggaaaagacagtctttttaacaaatggtgctggcataactggatatccatctgcaaaaaaatgaaacaagacccatacctcactccatgcacaaaaactgtctcaaaatggatcaaagacctaaatataaaatctaaaacaataaagatcatggaagaaaaaacagggacaatgttaggagccctaatacatggcataaacagtatacaaaacattacaaagaatgtagaagaaaagctagataactgggagctcctagaaatcaaatacctgtgctcatccaaagacttcactaaaagggtaaaaagactacctacagactgggaaaaagtttttacctatgacatttctgatcagcacctgatctctaaaatctacatgatactgcaaaaactcaactacaaaaagacaaacaacccaattaaaaaatgggcaaaagatatgaatagacacttcactaaagaagacattcaggtagctaacagatatatgaggaaatgttcatgatcattagccattagagaaatgcagatcaaaactacaatgagatttcatctcactccaacaaaaaaataggctggcattaatccaaaaaacacaaaattataaatgttggagaggctgtggagagattggaacacttctacactgctggtggggatgtcaaatggtacaaccactttggaaatcaatttggcgcttccttaaaaagctagaaatagaactaccacatgatccagcaatcccaatccttggaatatattctagagaaataagagcctttacacgaacagatatatgcacacccatgtttattgcagcagtgtttacaatagcaaaaagatggaggcaaccaaggtgcacatcaacagatgaatggataaataaattatggtatattcacacaatggaatactacacatcgataaagaacagtgaagaatctgtgaagcatttcataacacggaggaacctggaaggcattatgttgagtgaaattagtcagttgcaaaaggacaaatattgcataagaccactattataagaactggagaaatagtttaaattgagaagaaaacattcttttgtggttacgagacgggggagggagggagggtgggagaggggcattcactaattagacagtagataagaactactttaggtgaagggaaagacagcacacaatacaggggaggtcagcacaactggactaaaccaaaagcaaagaagtttcctgaataaactgaatgcttcgaaggccagcgtggcagaggtctggggaccatggtttcaggggacatctaagtcaattggcataataaaatctattaagaaaacattctgcttcccattttgaagagtgatatctggggtcttaaaggctagcaagcacccatctaagatgcatcaattggtctcaacccacctggatcaaaggagaatgaagaacaccaaggacacaagacaattacaagctcaagagacagaaagggccacaagaaccagagactacatcatcttgagaccagaagaactagatggtgcccggctacaactgatgactgccctgacaggcaacacaacagagaacccctgagggagcaggagagcagtgggatgcagatcccaaattctcttaagaccagaattaatggtctgactgagaccagaaggaccccggtagtcatggctcccagaccttctgttggcccaggacaggaatcattcccaaagccaactcttcagacatggattggactggacaatgggtaggagagggatgctggtgaggagtgagcttcttgaataaggtggacacttgagactatgttggcatctcctgcctggaggggagatgagggtggagggggttagaagctggcgaaatggacacgaaaagagagtggagggtgagagcggcctgtctcattaggggagagtaattgggattgggtagcaaagtgtatatgggtttttgtgtgagagactgacttgattgtaaactttcactttaagtacaataaaaattattaaaaaaataaatgaaagtgcactaaactgttggtggatcacataaacagaggagaacattcagataatcacagatgctgagtagtgtttgacagtctcaagaagaagccccatatggcacaaatactattcctaaaaaaaggtcaaaggggaccataccaaaaccaaactagctgtcttggaattgaatccgattcatggcaaccccatgtgtttcagaatagaactgtgttccacagggttttcaatagctgtgctcttttggaagcagattgctagggctttcttcccaggcacctctgggtggactgctgtttgcaccacccagggactccaaagggtactataaccaaaaaccaatttcatggctgttgagtggattctgactcatagcgattctagtcagccactaatagaatatttgacacatgggtgggtatatagaaaatgaccatggaaatacctaccttaggactataggtcatttgtgtacattttaaatgaacatcagaaagtctgttctcaggtaaactgtttataatcttctggcttctcccaaatttccactcctgggtgaatgtctagccctctctcagtgggaaggagtctcttctggatggcttagtcaaacttgactgaatataaatagccagagctaagattccatccatatggacacatcactatagtatctttctgtagctcttatgatccaaggagaatggaagactttagactttagaatggaagacttagagagaagattgagcctccccttcgaaggctccctttccaatcagttgagagaagggcagattttcaagcagcttggtataattttgcatctggaccaattttatacataaaacttttacctacacttataatttactttcttttgtaatgtaaatctttagctataagcacaatattaaatccctgcaagaagatgggacagcaattggcaagatcacacaacattttaattgttagtataagagtatccttacacaggaattcctgggtggtgcagtcaacgctctaggttgctaaccaaaaagatgagtggctgtgtttgctatttgcttcttcttcagaatctttaccacaacacagcatctgtgattacctaaacattcgcctccatttatgtaattcactaagggacaagtgcacttttaaaagaggtactcagatctgtctttttaacaacatatacttttccctttctaaccagaggtacttcggaataaaggcctggtgatctacttctgaaaaaccagccactgaattccctataaagcacagttttactctgacacacatggggtcaccatgagtcagaatcaactcaacagcaactgttgttattttgtttttccatctctagaagacctacctcttaaaacatttgccttcttcaggaagcaacaatgttaaaaactaaggtttttaccaggccttgaatattaggatatgtggtccctttgcttttacaggcaaagaatgtcaggacaacactccataagtataggtttttatataggataggtctctcaggacacttgactaaagcatcagattcaacatgtacgaataaaggaattcaattagtgagagtttgccttaaatgcaatcatcgtcaagcagaacaggtatgccattacacaggtatgccatttatgcatttataaatgcctggaacattggctgtcccctctcagtcaggaggaaatataaaaggttcacaaaaatttttttgtacagtgaacactatttatagatagctacacatggggtctctggtggcgtagtggttaagtgctatggctgctaaccaagaggtcagcggttcaaatccgccaggcgctccttggaaactctattgggcaggtctactctgccctatagcattgctacgagtcggaatcaactcgacggcagtgggtttggtttggtttgggttacaaatggggtcaccagaagtcagaaccaacgctagagcaactggcttcgttttaggttctttactgaataaataaagcaccactattacaacacatgaacgtctttaactttcttttctttttttatgtaaaaaggatacttctatttaacaagcttctggtccactggcattaagtccaaaccatggctacagccagcagccccacaggtgtataggatgaggaaatgcatgtacattcaaatttcacctacttattcaaagaaaaggtgcaaaagtcatcaagaaggtttcaggacaaatcattgaatgaaaatgagagcagaagagaaacagaagaaatattcctagaatctcaaataataagtatgatttagatggtgaacgttgattgcgtgttttaagtatttttcatgcagtattcaaggaaccctcatgataaccctagacaacaggcactatttctaatcaattttttttttaagattctgaagttgaggctatactaagtaaatgacagagacagggtttgaacccaggcaatctgaatgcagacacccagaacttgacgactggacttgtggcctcccctgaatagtatgaggggatttctttcctgagccagtaaacattcacctcaaccagtgaatcaacacatgttcttcagcctctccctttccaggatttgttggatactgtggggtataaaagaggtttaagagatgatcttaaaaagacagatggtctttgccattaagaacattattagattggttgggaacatggtgctacagacaaaagaaccacgccatccctctaaagcaaagacccgacaaactaaatagaacagagacaaacatcagtcctggaaccctatgcattaaacgaagagagaaagagcttaaccgagcaccgaatggattaagaaactgacagaggacagacagtaaggagaaacatgggcagaggtcccctatcagctaatgtagcacagatttaccatctaggactcctgtctgagactggtggatgggaagtatggaaaagcagatttatgcagctcccagcaggagacagagcacccagtagccagcaatacatgttttcccacctcccaccctccttccccctgcttggcctctgttgcttcccagtaggctgatccgaggcttcctgggggggccagttggccacttaccagctggctgcaatcacggactgagaagtgacagctctgtgctgctcagatccaccctgcccggctccttcgtgccatttctttgtcgctggggatgcttttcttggtttcttttggttccttccctgcgtctcacatcttccccctcttttctctcaaacaccagactctgcgtgccatctttgcttgttcttgacaggctgtgaagtgctgctcaactggggaactgcttcctcaatctttcttttttgtttgctttttatttttcttcgtttctcagtttcttgtctctttctacttaccttcctttcctttctcctgaatatctggcactgtgtaccatctccaccccttctagctgggctgtactgtgtggcttaggagccactttcctggtctgtaaagtgttggtgggatctcgggggcaattattatttgttttaaattctcttttcctgtttttttcccttcctttctcagtttctcctctctccactccaatggcaggctccctcagtactttttttttttttttacttctgtttctctctctctctcttcttttccctacccaacctagctccacacatcacagcctctcctctcaccctccctcctgcccatctaaaccatgccctgaacactgcactcctgagcagcacaggcatggcctaccagaacctgccctgcactgacccccagttcaccttgtcagccccagtagttgccacaaacaacccttcacagccctttcccttcagctggacctgccctgctgcaccatagctgagcaactggccatggccattggacaataaggtgaaacatattgtgttcacagcaaacaaaaaacgcacagcccgcctgctcagacacaatcaaataaagaagcagaaaaaacaaatctacaatcaataaacaaagaaaataactactgaatgtcccaaagacagcagataatataaaaacattaaaaaaaaaaaaaaaaacaggcaggatggttccagtaggcatacaaaataaaacatcagatgactttccagtagaaggaaaagcactggaactacctgatagggaattcaaatctctaatattcagaggtgcccaagagttgaagcaaaaaagagacaaaaatgaggaaaaaataggcaaattaatggaaaaggcaggcaaattaatggaaaaggcagacaaattaatggaaaacagagacaaaaatggaagaattcaggaaaataatacagggacaaactgtccaaataaattcacaaccagaaatcatacaaacccaaaagataaacaacaagttttcagaaatggacaatgacatagaaggtctgaggagcaggtctgaaacaatggaagacaggatcagtgaaattgaagacaaatacttggataccactttgagaaaaaaatcagaaaaaagaacgaagaaaaatgaagaaatcctgagaattattcgggatacaatcaaaagcaaaaatttacaagtgattggagttccagaactgggggagaaaacagaaaacacagagaggatcgttgatgaactcctgagagagaacttccctaatattatgaaaaaggaaaagctggcatccaagaagctcaataaacctcatataggatagactccaaaagaaaatcaccaaggcatatcataatcacactcactaaaaccaaagacaaagaaagaatccagaaagcagctcaagaaaaatgaaaagtcacatacagagtaggaacaataagactaaactctgattactcagcagaaaccatgcaggcaagaaggcaacggaatgacatacataaaaccttgaaagaaaaaaaattgccaaccaagaataatatatcctgcaaaactcattcaaatatcatggtgaagttagcatttccagataaactgcataaaaatcacttggtaacagaagaaatcaaagatggaatcaaaaaaattccttgaatcaactgagaatgaaaatacatcacccaaaacctctgggacacagcaaaggcagtgctcagaagtcattttatagcaatagatgtacacatcaaaaaagaggggacaaaatcaaaacattagctacccagctcagaaaaatagagaatgccaggagaagcccacagccaacagaagaaagtaaataataaaaatcagggcagaaataaatgaaacacaatagaaaggcaatagaaagaatcaagaaaatcaacaaaccactggccaaactgataaaagagaaataggggagaacacaaataacccaaataaggaatgaagtgggggacattacaacaaatccaactgaaataaaacagatcataacagagtattatgaaaaactccaacaaatgtgaaaacctagaggaaatagacaaatttctagaaacatactacctacccaaactaatgcaaaataatactgaaaatctgaacagactcatacaagagaagagattgaaaaggtaataagaaaaaaaaaaaaaaaaaaactcccaacaaaaaagttctggcccatatggcttcactggagaattctaccaaatattcagagaagagcttacaccagtactactcaaactatttcagaacatagaaaaggaatggatacttctgaatttattctatgaagccagcataatcctgataccagaaccaggcaaagacaccacataaaaagaaaattacagaccaatacctcataatatagatgcaaaactctcaaaaaacttttttagccaatagaattcagcatcatattgaaaaaataatacaccacaaccaagtgggattcataccaggcttgcaacgatggttcaatattagaatatcaatcaacataatctaccacataaataaaaggaaaagaatcacatgatcatctcaatcaacacagaaaaggcattcgacaaagttcaacacacattcctgataaaaactctcagtaaaataggtacagaagggaaattcctcaacataataaatgacatctatacaaaaccagcggccaacatcattcttaatggagagaggctgaaaacattctccttctgaacaggaacgagacaaggatgccctttatcactacccctatttaacactgtgctagctagaacaataaggcaagaaaaagaaataaaggcatctaaattggtaaggaagaagtaaaactgtccctatttgcagatgatatgatgctatacatagaaaaaccaaaagactccacgagaatactactggaactaatagaaagattcagcagagtggcaggatacatgataaatatacaaaaatcagttgaactcccatataccaataaagagaatgacgaaaagcagatcaggaaaacaataccatttataacagcccttaaaaaaaataaaatagttaggaataaatttaaccaggaatgcaaaagacctatatacaaagaaaactacaaaaccctactacaagaaaccaaaagagacctaaataaatggaaaaacataccatgatcatggataggtagactcaatattgtggaaatgacaattctaccctaagcaatcttcaaatacaatgcaatcccgatccaaataccaaaaacattctttaaagagatggaaaaacaaatcattaactttgtatggaaagggaagaggccccggatcagtaaagcactattgaaaaaagaagaataggaggactcacactatctgacttcagaacctactatacagctatggtagtcgaaacagcctggaactggtacaatgacatatacgttgaccaatgaaacagaattaagaatccagatgtaaatccattcgcctgtggtcacttcatcttcaacaagagtccaaagcccagcaaatggggaaaagacagccttttaaacaaattgtgctaggaaaactggatgtccatctgcaaaaaaaggaaaaaggacccatacctcacaccatacacaaaaactaactcaaagtggatcaaagacctaaatataaaaccaaaaactataaagatcatagaagaaaaaataggatcaacactaaaggccctaatacgtggcattaacaggctacaaaccataactaacaatacaaagcccagaagataagccagataactggaatcttctaaaaattaaacacttatgttcatcaaaagacttcaccaaaagagtaaaaagagaacctcagcctgggaaaaattttttggctgttacaaacctgacaaaggcctaatctctaaaatccacagaaaaatccaacatctctacaacaaaaagacaaataatccaattaaaaaaacgggcaaaggaaatgaacagacacttcaccaaagaagacattcaagtggctaacagacacacaaggaaatgcttgcaatcactagccatagccattagagaagtgcaaatcaaaatcacaaagagataccatctcgccctgacaatattggcatgaatcaaaaaaatacaaaataacaaatgttggagaggctgtagggagactggaactcttacacactgctggtgggaatgcaaaatggtacaaccactttggaaaacgatatggtacttccttaaaaaagctggaatgatccatatgatccagcaatcccactcctaggaatataccctagagaaataagagctgtcacatgaattgacatatgcacattcatattcattgcagcattgttcacaaaggcaaaaatatgaaaatgtcctagatatccatcaacagatgaatcaatagacaaactccggtacatacacacaagaataaagaacaatgatgaatctgtgaaacatcttacaacgtggatgaatctggagggcattatgctgagtgaaataagccaatcacaaaggcacaaatattgtatgagaccactactataaaaactcatgaaatgtttacacacacacacacacacacacacacacaaaaacaatctttgatggtcaaaatggaggggaggggtggggatggaaaaacacgaaatagataagtagataagtggtaactttggtgaagtgtaagacagtacacaatactggggaagccagcacaagcttgtactaagctccataaaaaaaaactccatagacacatccaaacttcccgagttactgaattactggaatgagggctgtggggaccatggtctcaagagaacatctagctgaattgacataacatagtttataaagaaaatgttctacattctactttggtgagtttggggtcttaaaagcctgtgaacggctgtctaagatactccactggtctcaccccttcgggagcaagggagaatgaaaaaaactaaagacacaaaggaaagattcatgcaaagcactaatgggtcacaactaccatggcctccaccagtccgagtccagtacaactagacggtgcccggctaccaccactgactgcactgacaggaatcacgatagagggtcccaaacagagctggaggaaaatgtagaacaaaattctaactcacaaaaaaaagacaagcttactggcctgacagagactgcagaaaccccgagagtatggcccccggacaccctttcagctcagtatgaagtcactgctgaggttcacccttcagccaaagattagacaggtccataaaacaaaatgagactaaaggggtacaccagcccaggggcaaggactataagccaggagggtacaggtaagctggtaatagggaacccaaggtcgagaagggagagtgttgacatgtcctggggttgttaaccaatgtcataaaatagtatgtacactaactgtttaatgagaagctaagtttgtcctctaaaccttcatgtagaatacaataataataataataaagagaccaattcaacaacaacaacgaaaatataatatgattaaaaaacccactgttgtcaagtcaatttcggacggcatagaaatgccccatagagtttccaaggagggcctggtggatctgaactgcccaccttttggttagcagccatagcacttaaccactacaccaccatggttcccataatatagttagaccaagaattattatgtataaaataatgagttggcaaggcgtaagtacctagagcagagatagctgtacttcttctgtaaaggaccaaatctttaatattttaggttttgtgtgccatacaatctctgcttattcaactctgccactgtacagcaaaagaagccataaaatatatatatatataaatgaataggcatgtctgtgttgcaatcaaacgatttataaatacaagttggaagcgattgggccacagtttgcagactcctaatctattttaccagttgatatctcacgaaaaggaattaattctaatcgttcatttcctaggaggtgctatttgtttcatctaaaacttaaaagctcccaaaaagccatgggactgggcaactgtcttattattgagcaacaaaacatgtttgatatacctcccaccaaatttaataaaatcgtagccactgtcaaccatgaaatacttctaagtttgcattttccagagaggataaacctttcagcagttctggaaatcacttcatatttgtgcttgtcaatgtgcaaggaacgtgtcttttacctatctcagtttgattacatctcagtaaacggcactggttctgtgttataagtacaattaaattttacccattggtgtttcgccagtagccagtgtctcttcttattctaagtaggaacagatacttcctccccttggatggacaacagggtctgtagtcacttgctgccagtgttggttagtgttagagattattcaaattactttaattcaacaacaatttacaagggccaacttcatgtcaaactaatcgcaacactaaataattttgagtatcagtcatagtgtatatacagatgaataattattgaattacacagatacaagttttattgttttttaataccctaagatatttcatgttgacaagagttgacatctttaaatgcttttccaacttattttctcagatgctgaaatttctaaatctaacctctcattaggaaggaacaactcagtatggagaaagatcttttatgtgcagatcacagattgtagtggaaattttttctctacatcactctgccaaaaggtttatatttactgtgtgttaaacagaagacgcagtgttaggtcagtggtagaatgactgccttccacgcaggttaccgaagttcagttcccagccaaggcacctcatgtgccgctaccacccgtcttagtggaagcttgtatattgctatcatgcttaacaggtttcagcagagcttccagactaagatagaataggaaaaaaggcctggtaattgactgctgataatcagccaatagaaaccctatggatcacaacagtccatccacaactgatcctggggatggtgcaggtgcaggctgtttggttctgttgtgcagggggtccctgagtcagggaccaactggacagcagctaacagcaatgtatgctaaataagtaaattttcctgcatagccagtcactaagtctcctacctcacaacatctgagttggcttaggagaagaagagtaagttggcaatctaaaatctgtgtcttgcaattttggcactgcctctttttccaataatttaactccccagattgtgtgtttggttcatattttaaagagttcaaaacttcagacgtccttgtgtctgctgctcattgattgctgttaaaactaaatgtttttcactctaatcaatacttccttacaaaataaacccaagcattgacaaacaactctgcagcacattccagctttcctaagagtggacagcgtgaaaaactactacacccaagaattaaaacagatcacattgactagagtgcttattacaatttttacaagtttcttacagctgaatcattccactgtaacaagactttattaaattagacagctattgaatcgtaagctttctgagaataacaattaatatgcctttgtcctttattactgtatcagaccattataaccacactgctcatgttcatttttatatcctcactggtgatgaagttattaaagagcaggggctagagcagaatggggtacaaaatgtaaacaatgatggttttgtgtttcaggagactactgttccagaacgattttaaatggcatcactaccatttttaaatgaagttattgtatttttttaatgcacttggctgttttgggggagatgtgtttttatctgagactttgtattttatgcactctaagacgtgaattccctgatcttttacacgcatttgtcttgcaattatttgctcctcacatgattcactctcttaacagagcttctcctgggaatccctggtggatgggaggcctgggcagcaagcagcacatataagattgccactgaaatgtaccctgtgtgtctctctccctccaatactaattcactcaaacaccaaactcctattttctatcaataggtatttaaaaaaaaataataatttagtggtctggatataagctaaggcaggttgaaaaaagtaagatcaaacacttccaaataaaataaacagaacaacaagcccttcaagtacatgcatcttaaatagctactaaagaagaaggcccttttttttttttttttgcctttaacatgttatttgcaaaaaaagaactcaaggaacaatgaatctaaatcatttgaaccttccatgtgtttatccatgacaagcagcaacaaaggaatttacaagttttattagcagaggttgatatttcctgccaacagagatgatttttacattgcagggaagcaattcaatgaaccaaccccaaagcatttcaaaacgtgctttctacttcttgttccaagatagcacctctatgctgtagctcaaaattgccaccaagtagactgacagacaccagtctgactgtatctgtacaaaaaacagctacttctaacttggggagagttgaacaaatcacatcaaccagcatttacgaagtacctactatatgcatagtacactctagatgctaaagatgaaacacgtcctcatcatgagtaagaagtctgaacccctagtatcaacacctcactgcagaggccaatgttctttagacttcaatgtatcaattatttcatttatccctttaaaatccataagggaaaaaataacttattgatgctactgtgtctgagaaccagggcaacaacctgcttggagaaggctttcttattgccaataactgtttaatgacatgaaggagaagctccaaaacacataaaattggagtcacttctaaaaccactaagagtattcaagaggccaataaactataagttatggggaccccttttacaatctttgccagagatgctgctctgtagataataatagtgacatataactcacaggaggccaggcaagtacacggatggggcacatccacattctgggctagtaagcttcctttcctgcactggcacacctgacctttcacacaggagagctgattggtatgtgaaatcccaaaaggaagggaacctctaaacatatttgatgggccaattaatggaatgcaatatctaatctattctaatagtgcttccaagtcccatttagatgaggcctcagtttctagcattatttatcttttactagaaaacacgtcttttctcttggaagtactggcaccaaagggaagggaagttaacttttaataggtgcagttagatcttgaaatttttatctgaaagccataaagcttttaaaaatgaatttgtaaatgtaattgagcttctaatagctgctactgatagtaattaaagaaatctcatttccctaaattaaacataatgaaatgtttttcgagatcaaataaaactagaaaatgctatctgggtgacagaatttgcctctgaaagtggtgtcctggagtttggggggaagcctcagttgccagcaaaagccaatggcttatggggttgtgggtaatgtggaagtcaattccacagcatcatattaacttttactggctggtaaccaacttgagagccactgtattgcacagcttcacaatgcaatgcttatgcaaatgtaacattctttagaactcctccattagtgcctttaagaatttatttaattaaacgttgccagcatgtcctcagctcaacttgtacacttcgaactcagtgcttaaatttacattacttttgctttttcttaaagtaaaaatatgatttaggggccatagtgaccatctgaccgaggtctctgttaacaagcaaagaagtggtcattgtctcccaatttcttgattgtttttagggggaaaaaaatccacagtctctctcttatttcagcggtttgtcatcctagtagtcaagttttttccttagagttgatgaaaatattttgcatcttaatttaattccttgtcttattatctggacttctatgaatctaagaaagaattagtctgaaaacttcataaaaatgctttataaacggtttgtaaaaactcatccaagagagaataattaggtcagcctttggtcttccattaccagacacccatatctcatacacatacaatctcatatcttcccatgtacgtacggtaagtggtatgatgtattcgaaaggcttgtcacctccttttgattatttctgtcacatttctctagaattttcacattctctttaaaaagagtaatcgaaactcctgcaaaggttaggttaatgttaaacacaagcaaaaaaccatggatggatccccttactaaatctcaagtgctccatgttgcctcacccacgctcctaccccaagtaccaccccgatacctgacacaccaacagtcctcctctgttgagagtccctctttcgcttgttgaactgcacataccatggagtcaattaatacttatctttgactcattaaatgatgttcatctaacttttagtctgtaataaggcctgaattttttctccaacattggttccttgattatctctcccactgaattggtgatttggtttcttcatcctaatacaacatttcacttgaattaattcattcactcattaattatttagtgattgttcagtacataccaggcagcaacacatctgtcattcaacgtaggattcaaggtcctgtcctgaagatatttaaaatctggtcagtgatacctttttttagaactattattttaaatcattttacttcgtgtctctgctattaaaagtctaagttaactgtcctgtgttaacactcttttcaaactgatggctgagtacttggtttattcactctattcatacctgttcctcacccctagacctatgtcattctttagcacaatcctccaatcaactgaacagaaagggtgatcacagaccactagcttaaggatggaaacaataagggtttattcaagtacttcaaagggcaagtatattcagtaaaataataataatacacccattgccatctactcaattccccctcatggtaacccaaagtgtgtcagagtagaattgtgctccatagggtttttagtggctgactttttcagaattggaaaaccaggcctttcttctgagtcacctctttgggtagactcgaaccactaaccttttggttagtagccaagtgcttagccttttccatgatccagggactctgtattcaataaagcattcattatctccagggtttcaaacttggtggctgtgcctcacatcttctcctggccttcctccctttctttctctctagtttcaaatgggtttctaattcccccttccgatttaaggaaaattaaaaataaattggttttctggtaggagcttaaattggtacaaccacttcagaaaactgtttagcagtatctatcaaagctgaatatacgcatacccatgacccaacaattccactcagagttgctgtattgacttgaatagcgttcccctcaaaatctatgcccctcctggaacctcagaacgggaccttatttgaaaatactttgcagatatattcagtttaaaaaaaaggtcatagcagagtagggtgggccctaaatcctatataatttgcattcttatgagaagagacacagaaacagagacatagagggaagatggccataggaagaaggaggcaagattggagttatgctgccaggagccaaaggatgcctgaggctactggaagtggaaagaggcaaggaagggttttatccctagagactttagagggagcaggtccctcccaacaccttgatttcaacttgcagtctccataaccatagagaataaattcctgttgttttaaagtcacccagttcatggtactttgatacgggagccctagaaaactaatacaagtacgtatgtttgccatgtgtacacatgttcactgaagggcacatattagcagcattattcattacagccccaaactggaaacaacccaaatgtgtatccacataaaaaaattacagtgggatactacacgtcaatgaatgaacaaactataattagtttagttcaacaatacggatgagtatcataaacaatgttgagtaaaaaagagtacatacaatataatcccaacttatattatgtaaaaaacagacgaaactagtctatgctaggcagttatcatgacaggtgtaattaggtgcctacaggtggacttctggggtgctggcagtgttctgtttgttgattcaggtgctcgttcatagattccatttctaaaaattaattgagctttatacttctgtgcacttttctgtatgttcattatactttagtaaagttacaaaattaactgccttattggcttcaaaataccaaatctgttaagctcaaatctaatcagatcggtcagtactcataaaatctttcatgtctctcttctaccttcaggatataaagttcaaactcccagacttacaacataaaccagttgctactgagctgactccaattcatggtgagcccatgtgttgcagagtagaactgtgctccatagtgttttcaatggctgatttttgagaataagattgccaggcacccctagatggatttgaaccatcaacttttcagttagcagctgagaatgttaaccatctgcaccacccataaagtccttgacaacctggtgtgtcaatccagttccattcagccattccttcctgggatctctatgctcctggcacacacccccccccccttctttcccactgttgttctattttttgggcctagaatacctccctccaccccaacagattgctgtctggtgaactactcatcttcggagagccagttcaaataacagcccctcctcaaagtcccctttacctgtgtggagtaaaacgagcacctctttttctgtcttccagtgagatgttggccataatgctctcacactattagggttattatattatattgtaactgttcatgtttctgcctcttttgctaaagtttgaacaacttgaatgcatgaacattttcacctctagtgccaagcattagaatagatgctcaaaaagttttcactacataaataaatgacaaagaaaagctcttcaaattattattattattatttagtcccatatcagctgaaggtacatcaacaattggtacttgtaaagtcattctgagagtctgagataatacggtcacagtatctggcattctgattctgtaacttaaagactacagcgaaatcgcttgtcctcaaggcacactcagagaccagctgtctcaagcaagactttgacaagcgctggaccacaatcaattcatggttgaattctctgatgagcatcacaagggcagacagcctatgttttgtgagagagggatgcatatgcttaagatgtcagacaagcagcagttagagatggagttctgctgggaaaatcgaggaccctgatttatagtctccaccaggcaaaaagccagttcagctcagcagagagagtttaagatgaaacatcattctagaaaaaaaaactgcaggacattctcacccctcaaacatgtgtgttacccttagaatctatacctggtctgcttttctatcctctatagcctctgctttggcaattccatctaatttaagatctgaactactacctgtatgtgtaatacctcctcctctattcctagtctgcatgtcctttaacgtggaaccaggatctctgccatttgccttttctaactcactctccattcttctccaccctgatcccggccctgggaggctcacctgtatggccctccttaacgagttttgtgctctatggcttcctgtcaggtttggtccatgagaagcttcaccaggagacgggaagaagaacaaggaggaagaactatttatccacctagctcagtggtgctcaaactctggagtacatcagaatcacctggaggcctcgttaacatagattgctgggacccacgccagagcttctgattctgtaggtctggagtaaggcctgagaattttatttctaacaagttctcaggtgatgcccatgctgcttgtcaggggaccactttgagaaccactgccagagctccctccctaaatggttacttctgagctgcttctatccctccctccaccaacaggcactgctcttctcccaatgaccaactctacatgacttagtctctccaaattcaagtaactactcctcatccttgtcccttcagataggctgataacagcctgactgcttataagacccagctttcttcactgtaccttctggtctcctatttcaaaccaaccaaccaaccagttgtcatcaagtcgattctgactcatggtgaccccacaggtttcagagtaggactgctctccatagggtttccagtggcagtgatctcttggaagtagatcgccagatcttccttccaatccctattttcacacctttgtaaacagttcctacgtaataaacccttcttgagttatcctattccgaatgtgacatccatttccatctggaatcctgactgatagaacgcactttaaatttaatgagtgggcatgtcaacttgccttctttctttctaagcctactgctcttgctgtgttccctctgagatttatagcaccacttcctccaaagcacccagacttgtgagtttagtatcaggttttgacttcttgtaactgttgatccactgctctgggttctctattattctggaagccctttagcagaaatcatgtctttctagttttgtatctccacaacctaacatatcacatgccagtcatcttctgagtggccaaaaatatttgctgagaaaataaatgaattaaaatgtacagatcacatgtctttcatatatatgcagagccctggtggtgcaatggttaatgcttggctgctaaccaaaaggttggctattcaaacccaccagccactctgcaggagaaagatgtggcaggctgcttcgataaaggttaaaccaaaaaaaaaacaaacccactgccatcgagtcgattccgactcatagcgaccctataggacagactagaactgccccatagagtttccaaggactgcctggtagatttgaactgccaaccttttggttagcagatgtagcacttaaccactacaccaccagggtttccaaagattacagccttggaaatcttgtggggcagttctactctgtcctatagaatcactatgtgttagaatcaactacgtggtacacagcaacagcccacctcacatctggtctctaccaattttattgcttttgattgtacgatttcttgtctctcaaaataagctgcaggcaatcagagggtctacaaacaggtgctatgcttcctgtattgcaccaaacctcaggcacaatcattggcacagtacagtcactgaacgtgtatccatccactgtctatgaaaaggacacctgtggagaaccaatgcttactgtgctccaaatcttggagacattaaaaataactgagaagacagggcctccttctgggagtagctcagggagtagctagtttaactgagtgttatgaaaagaaccctgagctataagctttgtttgatacatttttgttaggggagtttactttgcttttacataaattttttcaagctctactctggagattatgactcaaaagatctaaatgggtcccaggaatctccgtacctaatgagcagtttgggtgtttcaaacactggtgggctctgcattaacccccactagagaagcccttgggtattgcatagaggaagaaaatacatagaagagaaacaaagacttcgcattgcttacagagtaattgtaagtgaccctatcaaaggtgccccattattagatatgctcattcaattaatttcaatttttgctttaaaaaaaaatccatcaactcgaaggcaatgggtttagtttttttttttttaatccaatggattaagatagtttccaaccaagaaagtgagtctccatttgccttattaattgccccataaaaaaagcataccagttaattctttacttcatgcagcactgaggggtagtaacgtggttgctacaagatataaaacattttatgcaattgaacttaaggtgaatgtgcttctaaatgaaggaaggcatgggtagtcagaaaaaggagtattgctccgtacatgtaaagctaaccagaaatcagacagttgccctttcggaaatttaaatcgttccatctctcctttccgtttgcttttggttaggcaggatttcattggaatctattcaaggcaagcagctgagtatatttgctatcatcgtgctctttgatctcagtatattggatgcagctgcagaaacaggtaatgtgggcaaatacgaagaaaacaaactgctgcccgcagattatttttttcagggttgttaggaagaaatccaagataattacaaatttccctccatttatttttaagaatatgaatagcaatacacacttcagttttttcaaaggatgtttcaccttttgaactcacttcgaattacgagttaagaaaatttattgtgctgtattcattcatttgctcattcaaaaatactgagattttgtaccagacacataaataaggagccacatactctaacagtaacatcctggtgttctattcacatgtctgaagaatggtgctttctctattctccattttcacaacaatctcagagttacataacccatcacctcatttctagattagctccacagcttgcttgtctatatacatcagtattttatggtttcaatcatcttatatttagctgcaaaaactatcttcccaaatatagatcattggttcaatggcacaaaatggtatctcactgatcatcaatcattcaataaatcattcaacaaatgaagttattgaggacctagtgatactctaggcactgatggtgggaacaagagagagtaaaaaaccaaacgtaacccttggcttttacttttaaagactgtgatagaccaaataatcctgccaacccccccaaaaaaagatgtcaacatcttaattcctggaactatgaatgtggcaaaaggaattctgcagatataattaagcttacagattttaaaatggaagattatcctggattataccagtgggcccaatctaattccaccagcctttaaaagctaagaatttctctggctggaggcagagtagaagaagaagtcagagacattccaagcataagaaggattcaaagtgtcattgctggctctgaaatgtataaacccatgtgcaaggactggaaagaagccactagaaggtaagggtggcccctggataatggtgaaatgggccctcagtcctataaccacaagaacctagaatccaccaacctgaatgagcttggcagtggattcttcccagagcctccccataaggacctagctggccaatgccttgatttctgctttgtgaaacctgtagcacagaaaccaaacaaggcaactcagacttctgaccagggcttcgaatcagttctctcactgttctctcaccgagattgaagagaaatcggaactgacccaaattttttaaagtgggtgaaccgcaacaatagctgggctgggaattctaggtcaaagtcctggaatgggagacttggaggaggcatagtgagcccttccaggagctgatgctggagactggattatttccaggactgtggagagcaacacacattcaaacctgtgtggtaggctgccatctctgagtgggtcaccactgtatccgactctgtcagtcaagagatttggttgctacgtgtaagctgccttgtattctaggaagaagattaagtttgtagcagggctttgacccataatttttcctgttccaattaccgttctagttcatccctattttaaaaattcaggtctgttcaggttttgcttcatcagtcatgactgaaccaggaagaatcagttcttctgacctttagaactgtgatatagaacatgtgttgttttaagccgctgctaagttcctgtagtttgtgatggcatcgataggaaactaacacaaaaaccctacgaataatctatatagagaggtactgctttaggaagtagcagtccataattcagtagaagcagcagattctgctaagaaccagtgacacgatcctaaaagttttgcaaggattcagagaagagaaaattcagtgaggcttatagtagtcacagaaggcttcatgcaagaaatagaatttgaattgattgaataaagtaaaaaaaaaaaaaggacgaatttcaaaagagtggaacaacacagcagggacaagaacaggcaagttgggatgactgtgaaaagaacagctcaattgaagtggtaaatatgcttggttagcatggataacaaggcttatgaattaaacagtttgaaacctatgctcttaggggccagtctaggacaaagttggaatggtgagcaaagaaaagggaggctgtgtatgcacatgatgggggtaatgggacccctttccccatcccttcttcaaatagggcacttccattccgataggttttacatattggatttctgggtagaagtgaacttgatcaaagatctcatggctaaaaatgactgaaaagctgtatgtataaatagaaactctgactagcattgaaagtccttcaacaagtaactaacctgccaatgtggccaaactgggtcttttaggcatgcagtttactcatcgttcccgctcctgttattaacccttttctctcttagaaccttccatgctgaattccagggcttagtcccagagtctatttgtttttcctttaggaagaaatccatttctagggaggcccttttacttaacatattatattaatggtaaattatgcttttttttttttattgtgctttaagtgaaagtctataaaccaagtcagtctctcatacaaaaacttgtctacaccttgctatatactcctagttactctccctctaatgagacagcgcgctcctttcctccactttctatttttgtgtccatttggccaacttccgaccccctctgccctcccatctcccctccggacaggagctgtccacatagtctcatgtgtctacttgatccaagatgctcactcttgactagtatcattttctatcacatagtccactccgatccctaactgaagagttggctttgggaatggttcctgtcttgggctaacagaagtactttatgcttcttgatagactattcagtggttactgcactgatgtgctcgaagagattacagccaagacccatgactcatcttaattatcttgtgcctaaaacagtgtctgtcttagtcatctagtgctactataacagaaatactacaagtggatggctttaacaaagaggaatttattctctcacagtccagtaggctagaagtctgaattcagggcaccagctccaggggaaggctttctctgttggctctggaggaaggtccttgtcatcaatcttctcttggtctaggagcttctctgcacaggaaatctcaggtccaatgacacactctgctcccggcactgctttcttggtggtatgaggtccgcattcttagtccatctgagtgatgactctacccattgaggctgaggcagctctgctgccggtgttccttgtttcttcagcttcagcttcctggttccttgccctctcagctcctcaggcccaccactcatgtctgccctgctgaggcaagtgtcccaaagctcttcagctccaccagtaagtgcctggaggcaccccactccaccaggaagccctctcctgtgccaagtcactcaggtcctctcttgctctgtggttcggctccagtgctgtctcgtggttctgctgatgccagtcctctgctgctgctgctgctgcttcttgtcttcaaggcaatctaggcttttacaattaagcactttaaaactctttcagccctaacccattcacagtttgaaaactgcttccacattttaggtatctgttagaggaacatcccactcccggtaccaattctggagtcagcatgaatcctatatgcgcttattgaaaatgagtccatctaaaaatacattcaaatactaaaaaaaaaaaacctgttgctcttgagtcaatcccagcctatagcaaccctacaggacagagcaaaactgccccatagggtttccaaggctgcagtttttacaggagcatactgtcacctctttctcccagagagtagctggtgggttcgaacagctgacctttcagttagcagcagagcactcaactaaaaacaatgaaatcagtgctaaatgtagacttcgtcccatagaaatacacatttaggccaatttttaatttaagcatatatgtccctcttcaaaactttcaactggcaaacattacaccctgcacatgtaaccctttcctgttgctgacacacggccttccaaccaaaagtggaaaagtgccacctagtgctccaatgtcagcattacatgtcagcacaccactgaataccctaaggtccccctggtggacagctggaaaccctgggggcatattgattaagtgctatggctgctaaccataagatcagcagtttgaatccaccaggtgctccttggaagccctatggggcagttctactctgtcctatagagtcgctatgagtcagaatcgacttgacagtattggctttttttgggtggacggcttatttctcaagtgcaaattaaaagacataaatcatttcttaaaataagtcttagaaggtttcaagtgacattaaagttttaaaaaagtatttgcaaccaaaaagtcaggtctgtctgaggaagatttaactttattttttatgccagcagggcatgagacatttggagccccataactgtgcacacacccacctgtctatcagtttgtcatactgtgggggctcacatgttgctgtgatgctggaagctatgccactggtattcagataacagcagggccacctatggtggagaggtttcagctgagcttccagactaagacagactaggaagaaagacccagcagtctacttctgaagagatttagccagagaaaaccttacaaatagcagtggaacattgtctgatgttgtgccagaagacgagcccccaaggttggaaggcactcaaaagaccactggggaagagctgcctcctcaaagtagcgtcagccttaatggagtcaagctttcgggaccttcatttgttgatgtggcacaactcaaagttaattccactaataatcagaatctggaatgtacaaagtatgaatctaagaaaattggaaattatctaaaatgaaatggaacgcataaagatcaatatcctaggcattactgagctgaaatggactggtattggccattctgaattatacaatcacatggtctcttatgccaggaataacaacttgaaggggaatgaaattgcattcatcatcaaaaagaacatttcaagatctatcctgaagtacaacactgtcagtgataggataatatccatacacctacaaggaagaccagctaatatcactattattcaaatttacccaccaatcactaatgccaaagatgaagaaattaaagatttttaccagcttctgcagtctgaaatagatcgaacatgcagtcaggatgcattgataattactggtgattggaatgcgaaaactggaacaaagaagaagaattggttgttggcaaatatggtcttggttatagaaacaatgctggagatagcatgatagaatttttcaagaccaatgcttcctcattgcaaataccttttttcaccaacataaatagtgactatacacgtggacctcaccagatggaatacacaggaatcaaatcaactacatctgtggaaagagacgatggaaagctcaatatcatcagtcagaacaaggccaggggtgactgtggaaaagaccatcaattgcttgtatacaagttcaagttgaaactggagaaaattagcaaaagtacatgagagccaaaatatgaccttgagtatatcccacctgaatttagagccaatctcaagaatagatttgacacattgaacactaatgaccaaagaccagaagagttctgcaaggacatcatactaaaaagacaggaaagaaagaaaagacaaaatggatgtcagaagagattctgaaatttgaacactgagcaactaaagcaaacggaagaaatgatgaggtgaaagaactgaacagaagatttcaaagggcagctcgagaaggtaaactaaagtattatagtgacatgtgcaaaagagctggagatagaaaaccaaaaaggaagaagatgctcagcatttctcaagctgaaagaactgaagaaaaaattcaagcctcaagttacagtagtgaaggattctatggggaaaacattaaatgatgcaggccgcatcaaaagaagatggaaagaatacacagagtcattataccaaaaagaattggtcaatattcaaccatttcaagagctagcatatgatcagaaaccgatggaattgaaggaagaagtccaactgcactgaaggcactggcgaaaaacaaggctccaggaattgatggagtatcaattgaaatgtttagacaaatggatgcagtgatggaagtgctcactcgtctatgccaagaaatttggaagacagcttcctggccaactgactggaaaagatccgtatttatgcctattcccaagaaaggtgatccaactgaatgccgaaattatcgaacaatatcattaacaccacaagcaagcaaaattttgctgaagatcattcaaaagcagatgcagcaagtatatagacagagagctgctagaaattcaggccagattcagaagaggacatggagccagggatatcattgctatgtcagatggaccctggccgaaagcagagaataccagaaggatgtttacctgtgttttattgactatgcaaaggcattcgactgtgtggatcataacgaattatggataatatcgtggagaatgggaattcccgaacacttaactgtgctcatgaggaacctttatataaatcaagaggcagttgtttggacagaggaaggggatactgaatggtttaaagtcaggaaaagtgtgcgtcagggttgtatctttttgccatacctattcaatctgtatgctgagcaaataatacgagaagctggactatatgaagaagaatggggcattgggatcagaggaaggctcattaacaacctgtgttatgcagatgacacaaccttgcttgctgaaagtgaagaggacttgaagcacttactgatgaagatcaaagaccacagccttcagtaggtattgcacctcaacataaagaaaacaaaaatcttcacaactacaccaataagcaacatcaagataaatggagaaaagactgaagttgtcaaggatttcattttacttggatccacaatcaacacccagggaagcagcagtcaagaaatcaaaagatgcattgcactgggcaaatctgctgcaaaggacctctttaaagtgttgaaaagcaaagatgccaccttgaagactaaggtgtgcctaaccgaagccatggtattttcaatcgcatcatatgcatggaaaagctggactatgaataaggaaggccgaagaagaattgacccctttgaattatggtgttggcggcgaatatagaatataccacggactgccaaagaatgaacaaatctgtcttggacgaagtgcaaccagaatgctccttaaaagcaagggtggcgagactatatcttaaatactttgggcatattgtcaggaaggatcagtccctggagaagggcatcatgcttggtatagtaaagggtcagtggaaaagaggaagacccttaacgagatggaatgacacagtggctgcaacaatgggctcaagcataacagtgattgtgagcatgtcgcaagaccaggcagcgcttccttctgtgatacatagggtctctatgagccggaagtgactgaacggcacctaacaacaacgaaaatggtgcacaaagagatcttctcctacaagcactaagaatctggccagagtgaaaagtacagatttctttctaatttcctggaaaacccttcaaatttaggttcagcctcaagaggcttgcacataattctttccctctccaagggccaatttgatcaaatttgcactgactcttcttagccttggtttgtgccctcttgcatcgttcgtagatagaacatataattagccactcatcacgttcaaaggaagatatttttcacaactataccattagcttcctcagaaaacatagtctagaaaaataggcaaaaggctaagaagaaccatttttaaagtttagatcatttctgtaacagccaaagacgagtgtttgcagagactttgtgtgtgtgtgtgtgtgtgtaagaagtcttttaattactgcatgtaaaattcacataaagcactgtgctaaagattaaagatatgcaagcaaaaacatttggaattaaagaagtactgtatccacatttacaggagttacagcatcttaagtagaaaagggattcctttatggaaagcagaagtataaacacaatacttgaagctgcagcatcatacttacttttggaaaaagaagcagaatgtgtatttattcctgtgatttagagtgttaagaaaagagaacaaaatcaaaatgatctattaaaagaaaaaaaaaaacactaccgttgagtcagttttgactcatagcaaccttacagacagagcagaactgccccacagggttttcaaggagcatctggtggatttgaactgccgaccttttggttagcagccatagttcttaaaccactgtgccaccatcataccagggcttcctaaattcattcttgaatgtccttggcactgtgacctatgagtctggccaacctctgcattggatacccattcttactcttaagaaaaaacattgaattgacttgctttgatgcaaaacttttttttaatttaccaactattccattcaacttgttatttcttcagaatgtgtagtctttttggaagacaagccaggaagctgagagctttcaaaaccacttgcgactactcttaaattactttctgcagtttagataactgtttgtaaaccaagtgctttttcgagagtaggatccccaaacagccatctgctattttttccatgtaagaaaatacattattgtgacagttcagtgacattaagatggcactagagaatgagggtgatgttttcacttccacaaaaggagaagtgtaaaagggaactgcccaagaaaacttctactgtacgctacttctcaacaaagagaaaatgttctaaaacattctacctgtatatgtttaaagaagatggaagattatgtttcaagaaacttaaagtaaaaaacaaaaaccccaaacagtaggttgactacatcaggagggattaaagcattctcactccagatgaaaatatcccagcatttcagatggtctacttctgcccgtgtgattggtcctgaagtctccagacactctagctctcttggatctatgtcgtttcttctgctttgaattgactgcctctatttttttttttttgtagaggtagagtctctgggtggtgcagactgaaagggtggctgttcaaacccaccagaggcacctcaaaagaaaagcctagagatctgctcctaaaaggtcacagccttgaaagccctacagagcagttctactttgacacgtaaggggtcaccatgagttggaatcaaatctatggcacctagctgtttttttgtttgtttatttgtagtgacatgaggcatcggtggttcagtggtggaacgctcaccttccatgtgagacccaggtttgattctggccaatgcacctcaagcccagctaacacccatctaccagtggaggcttgcatgttgctatgatgctgaacaagtttcagtggcgcttccagactgacagaccaggaagaaaggcctggcaatctacctccaaaaatcagtttatggaaactctatggatcacaatggtctgatccacaaccaatcatagggatggaataggagtgggcagtattttgttctgtggtacacgtggtcaccattagttgagggtagacttgacagctggcaacaacagtagaggcacgaaggcacaaagctgaagtcatcacttatcagaagctcaaaacccctgcttaggtctttggaatctaagtcttcttgggttcctgagctacaacaaacagtatcagttgtccataggaaaacagggacaaatacttcacttgccaagaattctcaggtatcttgggaaaccttattattgccactgattgttgttgatcaacactacatgaaccagctttatatttttgctggagtaaaacttcagaataaaaatatttttgcactgtaactctaaaatgcatagctgctatccaaagatttctaatttagagatgctgagataatactttcctatgcacccttgaaaaggtttagcgctgatcgagtatgacctaattttgttgttgttgtcgatttgtttaaaatattttccatattcctatttctattctctttccaaaggaatttttattttcacttctcagttaccttaacactctaacttacttttagtttctctgtcaactaataggaaaccctggtggcatagtagttaagtgctacggctgttaaccaaagggttggcagttcaaatccaccaggcgctccttggaaactctatggggcagttctactctgtcctgtagggtccctatgagttggaatcgacttgacagcactgggtttttggttttttggtcaactaataattgtattagatgaattccaattcaaaaagcctcttatttgaagccagccttataaatagggagtcttagttatctagtgctgctataacagaaatgccactagtggaaggctttaacaaacagaagtttattctctcatggtctagtagtccagaagtccaaattcagggcaccagctccaggtaaatgctctctctctgtcagttccggaggaaggcccttgttatcagtcctctcccagtctaggagtttctcaggcagggacactgggttcaaaggacatgctattctcctgactcttgtttcttggtggtatggggttcccatactcctctgctcacttttctgtatatcaaaatagattggcttaagacacaaaccaatcctgtaggttgagtcctgccttattaacataactacctctaatcctacctcattaacatcagagaagtaggatttacaacaaacaggataatctcatcagatgacaaaatggtggacaaccacactatactggtaatcggggccaagccaagttgacacacatttttgttgacacaattcaatccataacactgggtaagaaccttttttgtatagactgaataatttctctgttttgtaagcttggattctcaaaactaaaatatcttaaatatggacatacctcaactgaataaaacaagcatcaactgaacacctacttgaagcacagcaatgcctgaaaaaacagacaatataaaggaagttaggcatggcaaacaatgaaagaacaattccaagcctgcaggcaagaagtcaatttttgactggttcattgtgtacagagctgtgctctgggaagacaaagcagggaaacgctctctggcgaagcaggtaaatttttttttgttacgtataaatcaatccctttcaacaatctgtggtgacccatccacaaaaacaacaatggtgccaacagtttgtaaaaaaaaaaattcttcacccagattgctgctttgttccaatttccaaatattaattgtaccctcaggaggtgggaagaaagtagaattaagaacttgggctctagagtgacaactgagtttgaatctcagttcagcctcttaggattaaatgagtttgttcactatttagtgcctcagctgccctcttgtccttgtctttgctgaagagtcaaaaagataataaggccactaagcatatcttatttgtttttatgagtcccactgtaaggctgctatgagctggaatgcactcgatggcaatgggtttggtttttggtattgttaggttaaggagccctggtggtgcagtggttaaaatgctcagctgctaactgaaaggttggtggttcaaacctaccagctgccccacgggataaagatgtggcaatctgtttccttgaagatttacagccttggaaaccctatgaagcagttctactctgtcctatagggtcgttatagggttgctatgagttggaattgactcaatggccctgggtttttatgacatttttaggtccctgggtggtgcaaatagtttgcactcaacaactagcctaaaggttggcagttccaaggtccccagtggctatgtgaaagaagagcctggagatccgcttctgtaaagattacagccaagaaaactctatggagcagttctactctgtaacacacggagacctgtgagtcagaatcaacttgatggaatgaatttggtctctggtatccctattttatactttataacatatacaaactgcaggatagagacgtttgggcagttgtttgggtaatactctgctcctcatcttttctcccactctttctaccccaagccaagtgcacatctaggcagttctatagtgtggctcacaggctccccccgacccattccaatgaccacacggagggctggctcacccaggttcctaacctcctgttctccaggctctctaaactccctactttctgtcaatcttcccaaattaaaatcttaagcatatgggttaggatgtcagggtagccctcgaaattggaaatgaagtgatttttttttctttttttttagaagacaattgtgggaaaataccttaacatgaaggaataagctgtacttggatgcctgaaaagattcctcatctcaggcaaagtataacctgtatcgacatgcctggaaatgtggtgttaacagttacgaagggagactggataataccaagtgttggcaaagatgtagaacagtgcttcttaattgagggtgattttgcttctcttccccaggggacatctggcaatgtctggaggcattttccgttgtcacaaccagggaaggggtgctactggcatctagtgggtagaggccagacatgcagctcgacatcctacaatgcacaggaaaccccctatacacataacaaagaattatctggcccaaaatatcagtagtacccaggttgagacaccctgatgcagaataacggcagctctcacactctgctggagagattgcaaaatgcacaacccttcatctggtatcatgtggcaatgtccaacacgctcgtagcctatgccccagcaactccactctgagtaccttcaagaaactcttacacagtaacaagagttacaatcagtactgttcatagaagcagttcaaatttttatcaacagtagaatggataaataaatcctggtatgatcatacaatataaaactatgtagcagtggaagtgaatggactccggctacattgagagggggcacgtcttcaaaatcctacacagtccctggcactgaacccaccttcttcaagttaccttcctattactaattggctccaggtattttgctgccctgagagacagagctcaggtaagaatcctaagccttgtgatctcatgaaagggaagaatttccactatgcaagttactacattgggctctgatttagtcctcagtctagtttatgtaaaaaaatattattattttggttaattccaataccattcaccagtcaacaaatgctcaagcgcctactttgtattgggcattgtgtttgctgcagtacaaacaatgaagatggaactcatctggtctttgttctcaggaacactacaccctagagggggcaccaggcaaaccgggaagtctgcttggcagtatctgaggggatgctgtgatgggaaatcatgggacaggtgtgtcagggaaggtctgtctgaggaggcaacatcgatagagaattgaaggatgaaaaggaaccatccaggcaaagaaccaaccaggagaggtacattccaaggaaagggaacactggaatttgtgaaacaagaaattaataaccaataaaaccattattataacgtagtgtacttcatgtcagtccttttgcctgctttgtatttggaaagaaggagccctggcagtgcaatggttaagtacttggttgttaactggaatattggcggtttgaacctacccagtggttctgcaggagaaagagctggccatctgctcccataaagattacagtctagggaagctctgctctgccacgtggggtcgctatgagtcaagactgacttgactggacctaacaacaatcctaatttgaagtccttgggtggtacaaagagttaatgtgctcagctgctaactgaaaggttagagattcaagtctacccagaggaatcttggaagaaaggcctggtgatctacttctgaaaattcagccattggaaaccccatggcctatggagcacaattctactctgacacacatgtggttgccacgagttggagttgactgtgatggcatactggcattcctaatttacatacagtgttatgttgtttaatattatatcattaataatttttcatgctgccacatactcttcatataaatttaaatgactgtttattatattccatggagccctgatggtacactggttaagagctcaggctcctaaccaaaaggtcggcagttcaaattcaccagctgctccttggaaaccctacagcacaggctcttctctgtcctatagggcttctatgagtcggaactaacttgacaggttttttgttgttgttgctgttgctgttgctattatattccatagactggctataccatcttttacttaactactatcttgttttttggtcatttatgttacttatcatttttgcctctctgaatagtgctgagatgaaggtgtttctttatgtcactttttcctgtgtcttttgtattatttccttaggcttccctaccgtaaatgcaaacacacacacacacacgcacacacgaaaaatgaagaatatttcacttttatctttaaaacccttaagtttagaaaatagctcatgttatccaagcaataatatgtctttcgtttcagcatgttcttgaactctgtttaaaattcagcacatacataaactgaagaactgcgctaccgctaccacagaggccttaaaacttgaaatctggttttagaaggctgacatttcctcagctcatgatttaaatgatttaaagcacgtttttcctttctgtaatctctggcagtcagcctcacatattttgcttttgggatgctttatgaacggtgacaccaggccacattatatgtgacaagattagctgggaccgtctctgaatgaagcacaactaacttgaatcacgagcaaattaaaaatctcaactcgaatgccttcctgcagctccagcaccttttaggttttggggtaacaggttgcactctgccaaagaaatccccctaaacttcagcttttctcagaaatccacttacaaaaaggcaggagaggtctcatgtgagaaaatccaaattcttttgtgatgataaaaattttaagtgacaatattcagtattgggatgacaggggatcaccccctaacttgttaggcccattgttctgagcatcactgaggagcctaaggctgcactacgatttagctatcatttaataatctaagataaatgattgtaatcaatcatattgttaccatcagtaaaaaaaaaatcccagtgtgggtcatttttaaactacttcacagtgaatgaggcaacaataacaaatgcttacatttgtcaagttctttagagtttacaaatcatatttgcacatttcatcctcccaccctgcagcataggtaagacagaaagtttcattttatgagtgagaaaaataattcttttggaggttaagagatcagcataaggtagtatttgataatgccacgcaaaagacccagttgtcttctgattacaaatcaactgttccttctactctatgccatgacacccaggaccaaagcaggctaaacagggactcacttctagtcccaagttatgaactagccatgggatcttgtacaagtcaagcaacatcaggcctcaattccttcacttgtaaaatgataaaatctgattgcatgacttctaaaagtttagaactctattttctatcacacaattttctttttacataagaagaaaatacctccctgctacacgttcctgctccctgcccctcaatccactccatatccccaagacgagaatacagattgatctatataagtcagctccaatgtcacagcattataatgataaacccttagccgtgaggcgactctgactcatagcaaccctataggacagggtagagctgccccatagagtttccaaggagcgcctgttggatgtgaactgctgaccttttggttagcagtcatagcacttaaccactataccaccagggtttccattataataatagtggtataagataatattcatagctaatttttattgtatggttactatttgcaaggtactattttaagtgacttatatgacgagtcagttttaatcctcaccatacgtgtaaaccaaaccaaaaaacccagcgccgtcgagtcgatttcaactcatagtgaccctataggacagagtagaactgccccataaagtttccaaggagcgcctggaagattcaaactgccgaccctttggttagcagccgtagcgcttaaccactacaccaccagggtttccagtaaaattactattttccatttttcagataagggaacccacacatagtgaggttaagtaatgtgttgaaggtcacaaagctagagttgggatgcaaactcagacaacataattctggagccaggcacttacttaacctctactctatgcagccacatgccttgagttaaaattttgccaaactagtcttcaagagtgaacttcagtaaataaaatttcttgaccataggtgtaatctgaattctaattatctagaacagtgccatagcacctgttaaagggcaccaaccagcattttgcctaatgattaattcctatatatccttgacagaaatgtctgcaccattcacagggaggctttcattatgataatgatgttggttgctgttgagttgactctaactcttggcgactgtacatataatagaaggaaaagctgcctggtcctgcactatcctcatgattgttggtatgtctgagttcactgttgttcattgagggtttccctcattttcactgaccagacatgatgtcttttttccagcgactggtcattttcctgatgctgtgtcctaagtgagtgagttgcagtcttactatccttctttctgaggagcattctggttgtgtttctcctaagactgatttgttcattcttctagcagtccacggtatattcccaaaaccaaaggggtcatttgggcaatctactacaatgtagagacaataaaatgggtccttctcagtgcctggctccattcatttgctttaccagctgggctttctgaagggctcacttcctcttttgagtcagtagagactcacccacttttagaagaaacactgagactagatgctaagcccaaaaagaattccctcttccttcacctgaaaaggaaaaatctgatgtataacatacaaaattttatttttcatattaaaattcactctggtccattttctcccatttttgcagagtcatatttgttctttacgttaatggtgcagattcatagcaaaaagactgaaactatccctcaaataaagaatgaactgataacaactcatggcaactctatgtgtgtcagagtagaaccgtgtttgcaatggctggttttttggaagtagactaccaggcccttcttctcaggtgcctctgggtggactcgagcctccaacttttcagtcggcagctgagcatgttaaccatttctactacccagagatcctacacatgtggtgagttttttttagccccagaattcccctttgcaccatcccagttgaggtgggtggtattcttatctctcaaacattgagcctctctcacaggcagccctgggaagaagatgccactctaatctttctcctctccattactcaatgatgtccttataaaagttgtagaacgcagcatcccagcagaagggagactatacgagagaaatataccagcacctgtcagtggctacagatacatgcaataaagcaaacattataatgttgggacaaagacgtctgaacaactctcagcaatcctgtctatctaccttgatcttgaaacgctaacgttcactgtactaagcaggagagcagcacacccagccagtgctctgcctatttactgtttagtttctagaattccaccaccagcctgatctcgaaacctccaacagaatgtgctccagtaaatcttgctcccgctaatcaagatgcaaatcttttctttcccaattaggtccaattgcacagccgaagcggtgcatctgtttgcctttcaagaaggctcacccagggactcgcggtggtctactgacaaaacagctagatggtttgtcatatatctttccctcccacagagcgtctctgccatcttttatcagaggttatacacagcttcccttttgtgacagtattaacgcaggactgctgctgtaagcatccagactccgcttgccgcctgcagggacttctgacgagagtctatcaggactgctgatccccacgcttttccagtacagtggctcccactcagttgttagtgtgcgtgtgtagtaagcccacacctgcacacacatcaggccagctacccacgagagcgccatccagagcagtggaaatccatctgtttccagctagaaaataaggttacttttgggcagctgacgaactaatctgggagagtttaaagtaacagcaaataccttcatgtggctgctacggtaaggtttttatggggttaagaagcataaggcatcactgtccacattagggttgtttgtaaatcagtaagcagacacaccgggagtcctggtggtacagtggttaagagctcagccactaaccaaaaggccagcagttcgaatccacccctatggggcaattctcctctgtcctatagggtcactatgagtcggaattgattcgacggcaatgggttaagcagacaacccaacacatgcaggagatgcactatattctcgactgcaataatcagacctgatgctgactttgagaacatgtctcgtggatgacttccttttaaataattttacgatgggcatagtgtcataattccctacttcccagtgattcataaaaaagcaatttttcaaactgtcagaaggacacaaattttaaagggggaaatgtatcatttcactgcctttagaggccctcgtaaggctggaaggcagtatatactacaaacgatgccttagcttcctagtgctgctataacagaaagtaccacaagtgggtggatttaaagaacagaaattaattttctcacggttccggaggctagaagtcaaaagcacgaggctatacaggcaggtcgtcccttgcctatttcagtgtccagtagcaggcagcaatccttggcattcctgggcctgtagatacatctgtctcagtagtctgtcttcctcttccccctgggtgtgtctctgtgtctattctagttttttaactcgggagtgattagggttaagactcaccctacaatggtataacttcattaacacaacaaaaaataaacccccaatttccaaacaggattatatttatgggtacagggcacaggattatagaggggtacaattcaatccataacaaatggttacggctttcgagacagatacagttcaaaaaccagcgccgcaactgctcagcttctggacttaggcaagtagtttaacttctctgagcgagtacactggggtttgtaaacagcatgtgcaaagccagtgcagagaacatgttccacaaatactagccctcaccaactttatcactagaatattgtggttgctatcctgtgggttcccagagaactctgcagcagcttcgaggaagtctgcctgatggctttggtaccacacgtactttgtgactttcttattcaacactgtgttcatacttttgtaacaggaaggtggaggaggatatccaatgctctgctctgactagaaattccatccacacctgggcagcaacgtcaacgcacatggcctgtcttgcggagtggacagcattcaggacattcatgcagggtgactattctgaacctatctgtattcttcttttctgtatttcccttccatattggccttgtcaaggtcccactttatttatgctttttttttttttttttttctggtcctgaaacacttatcaacctagcctacatatcgattaacctcccgggcatgctgtggtctcagcttctcttcaaaacacgactatcccctctttagtcactcaggtgccaagctggctaagcctaatgaactaatctggtacacatagttcaggggctcctgatatattgacataggcctattctgggatatttaaaattttaagactctctgaagcaaaacctaataatcccaatgaattaatttctcttgctggacttttagatacttgagcacgtagacggagagacaaagggggcattctgaggtaaggtgcttctaaaggcagctctcaaattataatataaaggcaaaaacctatttttcatatcgtgatatcagtcctacagagggagagacagttttaggatactgttgtttctgagcactggtaaaataaggcattgtgtgctaaattaaagatccagtccttttaatccagcagaaatataattcccaactgaagcgaaatgtgggctttggtgaatgaactttttttttttttttttcctttctggttagtttgtttttgttgttttaaatagagaaaagcactaagatgtatctagggctgaattatagggctgcctccggtattatatggctgaatgcctcctcatggcatcagcctctggtgctggtctccaggggagtctccctcccacgccaaaggagacgtcttgttccattgtgtccagagcactatgtcacatgctccatctggaacttactgagggaggaaagaactcaactgggattttggatgctattttaagtgaatgtggctccctcttctggtggaaagcctgaatcaataataaattcatggtaaagggaggaggagaagggctagcctgtctctctcccacctccagaaatgtcaacaggataccccataagtgaaccagacaacagcagatctaccacggctcttacgtctggccactagagctaatctggtgagcaaattaaaacaaaacggaaatgctgtaatagggagggtaaaaacaaacaaaacaggcctgctttggaatagagaagatgtgacaaaaaactaatctcctaagaggtgtgtttacgagaaggcatttggtattcaaataaatttttctttaaataataagaaagttttttgatccctggagctcttaaatagaagctatctcagaaaatgagtacatgaacgtagggactcaaagaagatagagacgctgctttgaaacttgccattaactgaattcttcagaagatccagggaaggtaacgtgtcaagctgcctgtctgacgtttgagttttcatgagatcaaacacacagcattcaaagtatcagatatttataaatattataacgggacactgagaaagaacattttttattagaaattgagacgaggccaaaccatataattatttccccactaagccaaaaatgtagacaaccttaagagtagcattaagtatctatgattgaatgactttcaggaacaaaacaagttatgttccaacaacccgcattatatgccacttactaaatacattctaacaggctgagcatgagagaggcctagaaaaatggttaaacacaaaacaaaacaaaaaataaccctaacactctgaacagaagactctgttaggagtcccacatgttgtctcttaacgcttcattgattgctaaattatattcactcctgaatgaccccgatgtttctgcatcacaaaccgtgccacttgctggaggctacagcccagatttatcgtatctttatgagaggctttcaggactacaggccaggcgtcgtgcagccatgcagaagtttcaagttcacaggactgacggctgcctcctccagccaggggagatgagggaagccccaggtgtcacttttgtgggtctctgaggaccccttcccaggaggactggatacattttctagatctggggctatcaggaggtgagggttaggaccttgacagggacaactaagctagaggtcatgtttccggttcttccataggaagaggcccatcgccaccctggggggagctggaagaaaggaaatacatataaacttcatgcaccgttcagatccacacctgacagatgtatcagaaatctgaagatcaagagaatcataaatgacagacataatagacactcagaaacaaggagagggaataatgaaaatggagagaagataggaaaacacgcacttttgttttttttagggattaagaaatgtatgcaattaacattggtataatactattagccaaagacactataccccagtgatgcggtggttaagcactcagttcctaaccaaaaggttggtggttcaaacctaccagcagagaaagaaagatgtgagagtctgcttccatagacattacagccacggtaaccctacggggcagagttccactctgttctaaagggttgctatgagtcagcattgactcggtagcaggtaatgggtttcgtttgttttttcggtaaagacgttattggaatttcatcaatttttccactaatgtttcttctcttttgcagggtcctatctaggatcccaagctgaacttagtgacttctccttagtctcttataaccggtaacatttcttcagtttgctagattttgatgaccttgaaactatgaaaaaagtactggtcagttatcttataaaatggcctcaatttggatttgcctgatgttttctcatgtggttatacattttaggcaagtattgctgttgttattgttgttaggtgctattgagtcggttctgactcatagcgaccatattattattacattgtactacaaaacaaaacactgccccgtcctgtgccatgctcacaatcgttgttatgcttgagcccattgttgcagctactgtgtcaatccatctcattgagagtcttcctctttttcgctaaccctccatttcgccaagcatgatgtccttctccaggggctgatccctcctgataacatgcccaaagtatgaaagacgtagtctcaccatccttgcttctaaggagctttctagttgtacttcttccaagacagatttgtttgttcttttggcaattggtggtatattctatattctttgccaaaagcacaattcaaaggcatcaattcttctttagttccatattcatcgcccagtttctacatccaaacgatgcgactgaaaacaccatggcttgggtcaagcacaccttagacttcaaggtgccatctttgcttttcaacactttaaagaggtcttttgcagccaatttgcccaacgcaaaaatgtatcttttgatttcttgactgcgcttccatgggtattgattttggatcacaaaagaagtgtgtcatcagtgcattataacaaaggttcatgatgtcaatatgttttattcctggagatacttatcttgatcacttggttgagatggtgtctgcaggttctccattgtaaagatactatcttccctttgtatttaatgtatacatttgggaaggacactttaagattatgcaaacactgtttctcctccaacgtctgcccactaattttagcatccatcagtttcaactcatggaaatttattttactctacgggtaaaaatccaatgctcatgttatttacattattcattttgttgttgaaattgttctagcttgggccagtaggatctccttcaggttgactcccgtgttctttaagaaatccccatcaatttgaaggggcagaaactctttactttctgtcacaacaaaatattccaggctcatcttgtatgttctctgccccagccctggaatcaatcacttctccaaagagacccagttcactttattggagaatgacctttagaaaccaacatgtggtttagttgtgcttactgctactagtgtgtcattgctttaaaccctctcaaccatgcacagctaggaaacacatgtacatatagttccttaggaaaccctggtggcatagtagttaagtgctatggctgctaaccaaagggtcggcagttcgaatacgccaggcgctccttggaaactctatggggcagttccactctgccctatagggtcattatgagtcggaattgactcgaaggcactgggcctggtttttttgtttttttttttacagttacctacacatatacggagtcctggtggtgcagtggttaagagctcagctgctaaccaaaaggtcggcagttagaacccaccagccgctccttagaaaccctatggggtagttctactgtgtcccatagggtctctatgagctgacagcaatgggtttgggttttttttggagggggggttcacatacatacatctattatttctgtatctatctccctgtgtgtatagtatgtgtgtgtttgtgtgtatgtatgtgtcttgtgtgtacgatttctatgagtttatattgatacctctgatcctaatccaataccacaggcttcatttttacaatctcctttccctcatttataacttttttctccaacaataaaaatgtgactttcactagctacaatatattttaattccagcaaacacataaatggtttcagaattaccatctcatacccctgtgagaaacacctttactatgagattatagtatttatgcacagttctctttgcctttagcctaacaggatccaaatgagatactgcttctcactgatgcttaggttggtacttttcttcacccttccccttcagtttggcttttatattaatataattttatactatattaatataaaaaaagttaggttaatttgttactgcctgtattcgcttttgggttgctcccctacatccagattggttttaattattttatctccttatgttttgggtacgtgaagggtgtctgaaacatccttctgactctaggagtctgagctatacaaagttttactcaggaaagtgttggtcactccctcctcacccctgctatcccaggcccacttccctcttctctccacctcttccctgcccaacttctgtaggtaaccaatctcttcagtatttctcttgcacaaatgagcagttccttgtgtattttcttatatgccctttattcttgcataaagggtaccatagtactccatcgtgtggattccagttgttgtagagttgactccaacttatgatgaccctatgtatattaaacagtgctccatagaatcgtcaatggatgattttccagcagatcaccaggcctttcttctgaggtacatctagatggactcgaacctccaactgtttgggtagcagccaagcaagctaaccatctgcaccacagaggaactccactgtgtggctatagtatagttatttaattaatctcctaagtataggcatatatatgttcttttcaatattctggaattataagaagtgccgcagtgagtaaccttgcatgtgtgtatttttatagtgtaggaagtgtatcatcaaggtagattccaaaagtgggattgctagcttgaaaggaaagtgcatatgtaattttgttagatattaccgaatttccagtcagaaggattgcgccattttgccttcctacaagcaatgcataagtgcctgtttcccctccacctcaccaccagaatgtgtcgatattttctaatcttggctaatcccgtaggtaagaaatgagaatctctgtgatatttttaatttgcatttccctaattatgcgtgaatttcaacattttttccgtatgtgtcagggttatttttatctttttttgtgaattgtctctgcatgttttttcccatgttgggtttttgattctttgacactcaatttctggtggcatggtggttaagtgttcggctgctaaccaaaaggtcggcagttcgaatccaccagctgccccttggaaaccctatgaaaacctttggaaactctactgtgtcctacatggttgctatgagtcggaatcaactcgacgccaacgggctttggttttttagtttatatgttagggaatactagatctgtcttgtgatgtatgttgcaaatattttgtcagttgtctttcaaatttgttgcttttttgtcatgcaaattgttttcaaaattttatgtaatagaacttaccagtcttttactgcatctgggttttgagctataattagaaagccattctctattatcaaggttaaagaagaattaatctgttttcttctagtgcttctacagtttcacttgttatatttagatttctagttcacttggaatttattcttgtttacaacaatttgcagaaagaggatcttttggtggtgatttcaaggaatgcaggacgctcatccctttaagctcagaagattcttgggattgccttgatgtttctactctgacctagaccaacactaattccagaaactgtagctaggaggagatattaacttggagtcactagttggagagggacactcgattgaagctttatgcaatccaaacagattttcctcttcctattatcccttctctgctgctctgtctctgcctctgtccctccctctctcacccacagatgggaagctagaactcaaatgataagcctaattgggttaggagcaacaatggaatgatcttctgacagcccattctttatttcagggcacagtctaagctccacctaccaatcctcattgtaaagtttgcatggcagcgaccatggtaaatctattaatagaacttgcttctccattattagcaccatctgagcctgttagaaatcttaactaggagtttaatttctctacagagggctttaaattaattaggggtttacatgctaacaaagagcctgatgcatccataaatcaatcctgggcaggaggactactcggggaggacatctattcagtggagacctcacatccagtatccctgtcgggttcccaacaaaagggtgcaggtgtggaataggccactgttacaaggaagcccccataattattttgcatcacttaagccacagcaggtaatatggcaaatcaaagtcccaggcgttcagcaagtgaaacccatgtcaccatgaaaagccacatcatatcactttaacctcgataaatgaattgccataacactgcgatttattttatagcaagtcaaagaattagaaagacattgatgaaaataatctcgccttttccttttgtcaggaaaagaaagtaacagatggaaccactttttttttttttttttaatgtaccagacatcatttgtaagaacctatgaaattgcttgtgtcttttattaaatatactcactttaaggcttacactcacacatgctgttctttggatgaaatgtttctcattcctctagttaaacacagcatttgtatttttcaatcaactctgaaattgcagaacaatgattcccaacctttatacatttccctgtgatagtagttttatttcttttgtatgctttgattagaaagtacctgataacaaaagtacatatggatttactctttggtgatactgcattatatttgtaaaaatcatatcaacatctgtacaaaaatcaggtgtgtgcatatgaaaaacactttttaaaaaaaaatctacacgcaatgcctggtttaaatataggtttacagtttctttgcaagagttctctttccaacaatttctttgtccatccagtctgccattctgcacattgccttccccaaccacgagctcttgaagcctaaatgctagatgcacatatatttaactctatagtggtaactttctataattaattcctctatgaactgaaaactgtgattacatcaaaaccaaaatatgttaagaaatccatatttttaaaatatgaaacaaaaatatcccagtataaacataacgtctcaaaattcactggggatttaaactaaataacccaagtcacagatggttatagttctgaatgaatggcatcaagagtcttaagaattttactgatagaggaagttcccccctcaaacatatgatacaaaaagcctccataaagtattttccatctacgcgtgatcacagcatttggttaggctaacaatgattcaggccctgcagagttcatcgccatggtaagcaaagaaaagggaaagaagaaaagagcactgtgtgccagagaacaggtatttaatcacattccctagtctggacccccctggacggaactatgaagagaaacgtgagagggagggagtgggaattcataacgcattgtccaagccactccagggcacctccttcaccctcactgtaccttctgcaaccacacagatgctctcaggatgcaaatgtgcactagtgccaagcatatataaaaaataaagaattattctcttgatccctcatccccctccagctatcactccaatttttttcggctctcttcacactaaaactttgtgaaagaacggtctatcactgaggtctccatttccaagcctattcacttgtagtcaatgtcaagatgcctccctccctcatcatcccaaaaaaactacctttgtcacagctatctgcaacctaaacctgccaaatctaatgctctatgccctggccttttctctctggacctcctagcaggacttggcaaaggagacccctcctaccatcttgaaaccttttcttctcttggctcccctgacaagcactctcctagctttcctctgacattactgtccaccccttttcagtctcctagataggctcctcctgctatatgcaaagcctgtatgttgatttttccaccaggactccatcttcagagttctcttcatctccagctatactctcttcctgggggattttgggacagttcctcagatacaaatgctgtctggacatggatggctcctgagtgtgtatgtacagcactgaagtctgcaccaagtacagaattgcaactctggatgcttctggctatctccaatgttcgaaacagaactctcattatccaaccttctactccttagcccccctccaccctgtgactatccataatttgcttttccaccagtcttcttcacttcagtaaatgcatcattatccattcagttcctcccatgaaaaacctgtcccatatctcccatatctaatcagtcagcaagacctctcggcttttctcccaaaatatatcctgaactgtgttcacttttcatctctaaaccatcagcctggtctaaacctctatctactggccagtgcagcaataaatagccaactaagcggtctctctgcttccactcttgtccacccacctccaattttgtattctcacaaaagaatgatctatttaaaatgtaagacatcacttcactcccctactttaaatcttccagtgatgtatcatcagctttagactaacacccagtgccttcacatggccatgagggttactcctgtctacctcacactgtcacattccagcagtacttctgtcactcattaaaccttagccatcctggacttcttccttcatttcaaatatataaaactccattccagctcagggactttctccttgcttttctctctcttcgtatcattcttcttccatatctttgcatgggtacctccttttcatcactcccaccccagtcagatactgtatctgtggagaggtcctcacaagctaccccatttagaggagagcccgtcctcttattcaaaatggtgttcacaaccacatcctgttttattgttttcagattgcttaggaatccatcatgtctatttattagttacttgttaatttttcgggttttcttttccatgacataatgtaaatttcacaaaagaaggggctatgcctattctggtcatccctgtagtcacagtgtctatctaaagtaatattgagcctctggtgggcattccataaacagttgtttaatgagtgactgaacaattcatcagtgatattaacagtgcacatcattacttatcgggacaaaatactgcttgctatcaataaccacaattaaaaaacaaacagcagggtttatgcttgcgaggaaatggattagatgtactttttcctactctccctgctattacaactaaaaaccttggacaaaatatataagacaaacataggaagactctgaaaggtggagagaagaagagagattagttgggaacctcaggacatgaggaacaacacagtggtgagttcccttagttttccttttgactcctctatcccagacttgaagctgaaggagccagaaaccaataggtgcagataaataaaccccaacaaaaatctgctctctctagccaaagaaccaagagttaggtagcctggtaagacagagaacttttagacaagaaaagccctattctagccaaacaccatagaaagaaactgaggcctaaccctagtcacacctacaaagactcagtaagaaatttatatggccatgcttgccaggctgcaatgaggtgccccaacatctccactagggtgatgtcagagacggtgaagtagggaaccagaaatttcagccctgctggtggtaatgagcccccatctctatctcatggtgtaagtggagaccacattggaagcctggacttcgaccccaactcagcagcaacaaggctgcccttccactcgccactggggtgacaccagaggaggcctagtgaaaagacaggactttagctggtaataagacgagctgcctcccagtcccccggggtgtcagtaaaggccatgaggtaaacaatatgaggcatttctatcacttccatccagacaggtatcagtgagggcctggtagaagccagaatttccatccctgctcagtaacaacaaggagaccagtggaaaacctggatttacacatcaacctgtaagtaatgaagctgtacctccccttccccttgctgaagcagtgtcaaaagaagctgactaagcaggatgtttaaataaaatccatagtctcataacataatgcccaagatgtccaggtttcaattaaaaaataacttatcttacaaagaaccaggaagatttcaaaactaatgagaaaaagacaatcagtaggtatcaataccaagatgagagaggtattagaattacccaacaacgattttaaagcagccatcataaaaatgcttcaacaagcaattacaaacacatgagaaacaaatgaaaaaatagaacaaatgaaaaatatgaaacagaaccaaaggtaaatttaatactgaataattcaataactgaaataaaagtcaatggaaggatggagggacaaggggaaaaacaatgaacttgaagttaggaaagacacaatctaaaaagcaaaaagaatataaactgaaaaagaaaaaaaaaaaaagaacaaagcctcaaggatcactttggagttcagaaggaaaggagaaagagggcattgctgaaaaagtactcagagaaataatgggcaaaaatttcccaagtttggcaaaagatataaaactcaaacttttaccacttaaattaaatgaaccatttccttaaaaaacacacactttcacaactaacccaagagaaaatagatcatttgattagccctataattaaggatattgaatttataatttaaaaatgtaaaaagacatctctacactcagatggcttcactagagaattctaccaaatctttaaagaataattaacacaaattctatgcaatctctttccagaaaacaaaacaggagggaacactttccacttcattttatgaagctagtattgccctgacagtttaaacacaaaactacagaccaatgtctcacatgaatatagatgcaaaaaacattaatatactaacaaatagaatttaccaatagatgaaaaggaatatgcatatcaacaccaaggtaaccaaaaaacaacaacaaaaaaccaaacctgtcgcattcttatcaattctaactcatagtgaccctacaggacagagcagaactgcccccgaagagtttctaagaggcacctggtggatttgaactgccgaccttttgattagcagctatagcacttaaacactttgccaccagggtttccaagtgggagtttattccaggggtatgaggctaaaaatcatcagttaatgcaacctaccatgtaagcaggctaaaggagaaaaatcacactataatatcaattgatacagaaaaatatttgacaaaattcagcacccattcatgtttaaaacagttagaaaaataagaatagaggggaactccctcaatatgataaataaaatatttaaaaaatcttacacttaccattatacctaagggtgaaagactgaatgttttccccctaagactgggaacaaggctaggatatccactcttagtcaacataatgctaggagttctagtcagtgcaaaaaggcaagaaaaggaattaaaggttatatgaattagaaaagaaaacataaaaatgcccctatttgcagagcacattatcatctttgtggataatcctaaagaatctaccccccccaaaaaattatatgtgtgtgtgcatgtgtgtacatatatatacgtgcacgtgcgcgcacacacacacactcctagaactaacaagtgaattcacaaggtcacaggatataagataaacatacaaaaatcaattctatttctgtatactagtaataaatacaggggcacagaaataaaaaataaaataatgtctaattgctcaaaaaaatgaaatacttaggtataagtctaggggtaaaggaacttgtatacttagaaatatacaacactgatgaaagatataaagagaaatactgtgttcatggagtaaaaggctcagcatagtaaagatgtgaaaaactcccaagtatgtacagatctaatataattcctatcaaaatcccggcaaggtttttgtagttaaagacaagattattctaaaattttaaggaaagacaaagttattagaatagacaaaacgattttgaaaaggaagactcaaatggaaatagtcagtctaccctattccacaacttattatatagctacaataatcaatactctgtggtattggtatagggatggacacatggaacaatggaacagaataaagcacaaataaaaaaaaaggaaaaaatttttttttttcaaatagacccccacaaatattcccaactgattttcagcaaaggtgctaaagcaattcattgtaggaaagatggcttttacaacaaatggtgctggagcattggacttccattggcaaataagaaaattactttgaccacttgtacaaaactatcccaacatggatcacagccatacatatcaaacataaaactaccaaactttaaggaaaaaaaaaaaaaataggagaaaatctttgggatcaagggttgagcacacagttcttaacttgacaccaaaggacaatccataaaaggaaaaactgataaatccgacattatcaaaattcaacactttgttctgtaaaaagccttgcttagaggataaaaagacaagctacaggctgaaaaaaaaagttgcaaaccacatatcttacaaaagattagtatctacaatacacaaggagccctagtggtacagtggttaagaccttggctgccaaccaaaaggtcagcagttcaaattcaccagccgctccctggaaatgctatggggcagctctactttgtctcatagggtcactatgaatataccaaaaactaaaaaaataaaatactcaaattagaaaacgggtacaagccatgaagagatatttgaagattaaatagagatggcttatgttacacataaaagatgtccaatatcattaactattccattgcaggtgagttgattccaactcacggcaaccctacagaacagagtagaagtgccccatagggtttccaaggagcacctggtggattcgaactgccaatcttttggttagcagttgtagctcttaaccactacgccaccagggtttccattggagaaattcaaattaaaaccacaatgaggtatcaccacatacctatcagaatagctaaaattaaaaaaaataaataaatgaataagaacaccaccaaaggctgctatgggtgcagagaacgggatcactcaaacactgcctggggtaatgtcaattgataaagccatactggaaaacagtttggcagtttattaaaaaactaatcatgttgtgactcctgggcattttcccagagaaataaaaacttaggttcatacaaaatcctgcacacaaacggttataacagctttactcgtaatagcccaaaaccacaagcaatggttgaacgattaaacaaactgtggtacatccctatcatggaacactactcagaaattacagaaaaaaaagaacaaaccattgatgcacataacaacctgaatggttctccagagaattattttgagtgaaaaaggccaatcccaaaataattaaacactatatgatttcatttctatgacattcttgaaaaggcaacatcatagaaatggaaaacaaattattagttgccagggggtgggaacaggagggaagtaggtgtggctataaaaggccaacatgaggaaaagtggtcaccacagtgaaggacaactggcagggcactaaatgaaactgataccagctccagtgggaaacaatatgttggctggaagtaaagttcacgcaggatcacaagggcacccatgcgcaaggttatttaagctatgaggccccaaccacttcaacaccttcactgacatctgtcttaactcctcatctcagtgggcctcttgaaactattctatttctttctaataaacaaaagatgagggtgggctttcaagtctaactcttgctacattcacccaatgtggccggatcaaatatgaccagttactgggcaaggacagattatattaatagacaacaggcctttgatccattttgagagaaccgccttgcatatccacgtcagctgatccagcaactccacccagaagggccaaaaagatataaatacacacacacataatatataaaaaatacatatatatacacatgtatatatataactcacatatcgcgttctaatgcatgagtaagcagagtaggaggcaccacagactatcagtgtttagggccctcacatgccttcatacagccctggaagtcaggctaacaaacctagaccagtctctacatacatgagtatcactaaaggctcatcagtgaaggaatgacaaagtagtatattttttttattatttttattgtgctttaagtttacaaatcaagttagtctctcatacaaaaacttatctacatcttgctacatactccctattgctctccgcctaatgagacagccctctccctccctccactctctctttacgtgtccatttcaccagcttctaaccccctctaccctctcatctcccctccaggcaggaaatgccaacatagtctcaagtgtccacctgatccaagaagctcactcctcaccagcatccctcttcaacccattgtccagtccaatccatgtctgaagagttagcttcaggaatggttcctgccctgggccaaaagaaggtctgggggccatgaccaccggggtccttctagtctcagacaggccattaagtctggtctttttatgagaatttggagtctgcataccactgctctcctgctccctcaggggttctctgttgtgttccctgtcagggcagtcatcggttgtagccaggcaccatctagatattctggtcaaagtagtaaattttaagaagattaatttagagttgacaacatatgggatggaattacagggagtaaaaatccagaggtagaggaacctatagccaggacactgcagcaggagtggacagtgttgttaaggacagttaggaccaagaaaacaccaccccgatgaggagatctccatagaggtcttacaagaacaactctactgaagtggtggaggcagaaagctgactgcaaatgcatggaagaaacagaaacagtggatatggatcatccaagaaacaaattctgaagtattccacatcagttatttctagtataatagaccatatcctcagcttacatatcaagaaacaaaaagttggatcatcaaatataaagttgtcattctaaaagaatattttattaaatgattggacaaacaccttcctccaccacaaagcctttgacgagcatcttattccacgtacaagggcaggacaatagcatcagggacacacaagtcagtgtcgtgggttcctgacttttcattgtatagtgttgctgtttttgttacttactgtcaagtcagctccaactcatggcaacgtcatatacaacagaaggaaacattgcctggtcctgcaccatcttcatgactgttggtatgctcaagtccattgttgtggtcactattcatttcgagtgccttccagcctaggtggctcgcctttcagtgctatattgaacaatattctgttgtgatccgtagggtttcagcggctaatttttggaagcaggtcgccaggcctttcttcctaatctttcttagtctagaagctctgctgaaacctgtccaccatgggtgacccttttggtatttgaaatattggtggcatagcttccagcatcacagcaacacgcaagccaccattatacaaagtgacagatgagcagcagtacttcatagtacatacaggatacacacgtccccctctgtcacctcaaacctgacaagcacaactactatggcaaatacaccaatgttaagattgctatttctaggaccaccagcttcacttctctcctgtatttctaactgcacctattacctatcctcctgtgtcccctatttttgctgattatacaacttttcctacagtcactcattctctacatcttgagtcctgctcatttttacatcaatgacaaaatatattcctaaaatataaattttatatttccaaatatattactatacattgatactaataacatgaaacaggtttaataaaaaataatgcactcacatctctgcgtattgcaaacacaaataattataaaagataattatcttgataaaagagattgctggagtatacacttactaaacaagtgattattaataggtatgtaggaaaaaatattctatctcaattgagtttaacactgagtaaagttagacagtcatctatttggcaagactacccagagcttttaatataattatatgtagggtgaatcactaacatagagttaaaagatgctgagtttctcgagtgtatttgaaccattgcttttcacatcatacaccatacactccagatgctacaagctgaaagctaatttcagaagcagtgacttaacagtcaaaagcagccttattgactttcttgtgaacttggtactgtcgtgctgtgtgctgggataacacgaatcatcagatgagcacaaaatcagggcacaatgaagttaagaattcaaaccaataaaaaccaaaaccccttgccgtcgagttgataccaactcacagtgaccctatacgacagagtagaactcccccatagggtttcaaggagcacctggtgcattcaaacagcgaccttttcgttagcagccatagctcttaacctctacgccaccagggtttccgaagttaagaattaggtccttctaaaagggttttttttttttttttaaaagggttgctgtcaaaataaaatgatgcaaagttacagaaagtgaagttatgacatgacatggagttccttacacagaaagttgatgaagtcggaattgtttacagcacttagagcctttacagcacagattccttgacaacagcctttacagaaacagtataaaaactggcacagatttgtcactctttcttcttacttcagtttgccttcctatttgaaccactatcaatccctagcgaaaggcatctggaagaaaattcttcattaatgctcaaaggaatattttccttgtccaggccattgcagactggtaaagacgagggagagaattaaccggtgtgagaaacacaaaacaactaggcttgaaaggaggcctcatcattgcttccttcatgagctcctcggaatattagcaaaatcagaaattctgaaattgagtgtttatgataattagaaaagaatttttgacaaatctgtcaaggcattccacgcagaaaataaagtcagttcaacaactgcatcaatattgaagaaaaaaaaaatcaaactcagcttaggatgtagaaagtctcaagagaatgttgatccatccctatgaggagaatgaggctgactgagtccaaattatagagttaaaaaaaaaaaagaaaacccacccaagaactcaagaccttagaaccatgaatgaagtgaaagcaaaaactcctgagtccctcctaggaagaaggaacccatggctgcttttatcttaggtaaggcaacagatggaggagaaagcagatactttttacaaatgtttaaaggttgaggatgctggtgtgagcctcacccaaaggcagagtcggcatcacctatcaactttttgccacaactcctgagcgagtccccatgtgaaaatgtgaagtcacagcaagaaagctgagggagaagccccctgcctgaagtgtgagtagcaggaacagctgaaagctaagaagagccgggcaggtgaaccacctgaagctctctgggctcccagtgagtactaggcgggggctaccagctactggctgctgcgaaaggatccgagagctgtgagagaattcttgtggggagcatatacataaaatcaaaaccaattgctattgagtcaacccaactcatgtccaaaacagtcttgaaaaagaagaacaaagttggagaattcacgcttcccaatttcaacttactaaaaagctacagtaatcaagacaatgtattactggcagaaggacagacatcttgatcaatggaacagatttgagagtacataaataaatcctcacatttgtggtcaactaatttttttaccaaggtgccaagataattcaacacacaaaaaataggctgttcaaaaaaccatgctagaacaactggatattcatatgccaaagaatgaagttggaccccttcctcaaaccatatataaaaattaacttaaatcacagatccaaatttaagagataaaactataaaactctaagaagaaaatacagaaggcaaacctttgtgactggtttaggaaaagccttcttagatatgattgtaaaaacacaagtgacaaaagaaaagaatgataaattagactttatcaaaattaaacacttttgtgtttaaaagaataccatcagattgaaaagaaaaccaagagaatatataccatataaagggacttgaatctagaatatgtaaggaactgttacaacacagcttcaacacacaaaaatcagtcaggtttctctacaccagcaatgagcaagctgaaaaggaaatcaaggaaatattagcatttataataacacctaaaagaatcaagtacctaaaataaaatttaaccaggaaggcgaaagacctgtacagaaaaaactataaaatggtactaaaagaaattaaagaagatctaaataaatggaaggacattctgtgttcatggactggatgtcttaatatagttaaaatgtcaatagtgcctaaagccatccacatcaaaattccaacaaccttctttcagaaatacaaaagccaatccccaaatttatatggaggggcaagggaccctaaatagctaaagcaattttgaagaagaatgaagtaggaggactcacttcctggtttgaaaacacactactacagtaattaaattaaattactatagtaattaaaacagcctgaaatagagttgagagaccagatataaatccatgcagtaatgatcaactgatttcaacagggtgctaaatttattcagtgggaaggaatggtctcttcaaaacatgatgctgggaaaataggatttccacaggcagaataaattagggtccatgccttttttttttttttttatgcctaataccatacacaaaaatcaattcaaatggatcaagggcctaaatgtgaaaactaaaattcctggaagaaaatgtaggggagaggctatgggacctagtttttaatgatggtttatcagatatgacaacaaaaccacaaacaacaaaaatgtagataaacagaacttcataaaaattagatactttgtccatcaaagaactttatcaacaaaatgagacaacctatacaaacccagtgctgttgagtcgattccgacccatagagaccctataggacagagcagaactgccccatagagtttccaaggagcacctggcggatttaaactgccgatcctttggttagcagccgtagcacttaaccactacgccaccagggtttccaagattagagaaaatttttagaaaccatatatttgacaagggtcaaatatgcaaaatatatataaaatgggcaaagtttccgaaaagacatttctcagactgtatctaagtagcaaataagcaataatcgacatcaatagctttcaaagaaatacaaaccgaaggtaaacacacacctaccttataattcagcaattctaattttatgtattcatctaagagaaagtaaaatcaaagcccacaaaagaaatgtataagaattttacagcagttttattcatagtagcccaaatggaaacaatctaaatatctttcaaaggaaaatggataatgaaattgtggtatattcatacaatgaaataccgaaggaaaaaaaaaagcctagtgagacacacaaaacataagggaatctcaaaaacatgttgaaggaaagaagccagacataaatgcatatgcagtgtatgacaacatttacatgaagttcacgaacaggcaaaactactccgtgaattatacataaagtataacaagggtggtttgtgcaggggtgggggtgtgtgactgagacgagaaagggggaatattctgggtgatagaaacatactacactgtcattgggggtgctggtttcacaagtgaacgcatccatctaaattcaccaaatgggacaactaagatacatctatcttatttcactcagcgtgtcttccagctccatctatcaacacttcatttcttctactggctgagtagtattccattgcatgtacggaccacattttgtttatccattcatctgttgatggacacttaggttgttcccaccttttggctactgtgactagcactgcaatgaacagtggtgcacaagtctctaattgagtctgcgctttcacgtcctttgggtatatacctaggagtggaattgctaggtcatatggtagttctatttttagctttttgaggaaccaccacactgttttccacacagctataccatcacaggaggacaaatattatatgacctcacttatataaaaagacaagaaaaggcaaatgtatacagaacaaaatttattagtggttaccagggatgggagggagggggaaaaagggagtaaatggaaataccacattgattaagggtagggttgcacagttgattattgtaattgcatcaataagttattcacctgtgaaaagttgtgtgatagacatatttacaaatatgaccaaaaaaaaagtgtagctgcttaggctgcttacgtacaaccaaatacctcatgggattcggtttcttggtttggaggtttagcaccatagtttcatgggacatcccagttaattagcctaattacaggtttagtgcttctgttctacctcctagttcactgcatagtgcctggagtcttaaaagccagcaagcagctgtccaaggtacaataattggtctttttttttttttttttttgcccagagcaacagaggaagagagtcaggaataggatgagaaggcggaatgtgtggctaattgcctccatgaacaactgcctcctttgccatgagaccaaaagaactggatggcgcctggctaccattactgaacattttgatcaaagattccacagaagaatcctgattaaaaggggaaaaatgcagaagagaatttaaaactcttatggactctagactttctggagccacgaaggttggaagaaccactgaaactattgccctgagataatctttaaaccttaaaccaaaaatagtccctgaagtcttcttaaaaccatataatagctcagtttaactagcaaaaaacatctgccttgagcattacactcttttaagaagtatctctatgggagcacatggacaacagcaactcaaaagcttagataggaaccttaggggctgtgagtttatgctatggaaaagaacaactcaggtgggtgagaatgtataacttaaagaatgtaatcaatgtcgctaaatggtaacatgcagaaacaaactctcaacaataaaattttaaaaagatatgtctaccttaccatacataaattttacttcaatttaaaaaagaaaaaaaaaaaaaaacagggacagtgctatgcttcatggtattctactcttcctacccaccgccccccgccatttctagctcagagcacagacagccattccagccgcccaagagagtatgagactcttccatgtgcttaagttgtcttttaaaactccagttttgtttcaaactgaaacagtatctaagtaaaatttcctgttagaaatttctgacaggtagagcctttatctccagtatctgacatggaataaaagggtcttactctaggatcagcaaggggttaaatggaaggcgcatgctacatagcaaataagaataccatctgtaagaataatatttttacttgaaagaatcccaaggaaatctaaatggttctagactgattcaattttttaaatgtggtttaagagggaactcagctatgtcatccacagtagtattctgggggtttccctgcaaatccccccaattttatgtcttttaatctgtcatgtctgttgcagttttaaaaatagtgtttaatttcttaacttggtttacataaccttttacctgacagaaataatttctttttacaatgtctaatctccacctcttatcttcactgcttacggccatggtgtcattcttagacatggcttccactctgcctagatgccaaaaataacatactatatgtttctaatattttccactagacactctaatatttccttctaatttctcatatcttctcttctgatagtattatggcctttttctttttttttttaacttcaaggttttcatttaaattcccttaaaatttttagcgaaatatttcaaaaattcagaaaataatatctccaaatgagacatcaattacctttatccagattgaacgaatattttacatttttgtttcattaaaaaattaagtggctataccttcagcacttcccttccccccccagcccccccccccccggcatccatttctctaactctagtgtatattattcccatgtaccttaggtttttttttctacttctgtatcgataattaatattacgttcttgagatgtcaccatgttgatacatgcagacctagatcattttaactgctgtgtagtatttcattgtttgaataaattaatttgttcatccaatcctctcttgagggactctgaaattgtttcaactttttccttattagaaacagcgctaggtatgtgtgtatctttacatgagcccctttgcatatatgttggggtttccgcaggatagaaatatataagaggaattgatagtcacaggctgtgtttgctcttcaacttttctgtggctgttgttagttgccatcgggttgattccggctcctggcaatcccacgcgtgcagaggagaactgccccatggggtttccaaggctgggacctttcagaagcagatcgccaggcctgtctcctgaggcatctctgggtgagttcgaaccaccaacctttcagctagtaatagagcgattaaccattcgtgccatccagggactcctcaccttgacgaggtaacacaaaatggatttctgaaatgctgacatgagttcattccaacaaataatacagaagcattccaattttgacatatctttttttttgcctactggtattttcagacttttaaatttttttttttttccaaatagatgggcatggaatgctactccattgaactttaatctataatttgcatttttctgaacaatatgcttccaaggcttattggtcaagtcataatcctactggtctaccttgcaaaactaaaactctcctgtcagtctatggctgaatccatatgttttaaaaagaatccttattgtttagagatacatacaaaaatatttaccaatgaaatactgggatgtctcagacttgcttcaaaaataatatacttgaggaagaaaataagtgaagatgtgataactcttgaagttaatagtttattatacctcctttctactttaataaatgttttaaaaaatttataataagaatttttttctaatataccccctaaaaagctaccagactctgatggcattacagaggattctaccaagccttcaataagggagatattccttattttatacaaactggtccatagaaaggagctgtggtgatgcagtggttaagcactgagctgctaaccaaaatgttggcgactcgatcccaccagcagctccatgggagaaagatgtggcagtctacttctgcagagattacagccttggaagccctatagggtagttctactctgtcctatagggtcactgtgagtcagaatcaactccatgacaatgggtgtgggtttggttggatccagaaaaaagggcggggcggggggagtagtacaactcacatttctaaataaacttttttttaagaccagttttaggtttacagaaaattgcaaagataatacagagagttccaatataccctgaacccagttcccctatttttaatatcttatgtaaatattgcacatttgtcacaattaatgacccaatgctgatgtattatcattaactgaaatccctgctttattcagatgattttgttttttatcttatctcgttctcctgttccagcatctcacctaggatacattatatttaacgccatatctctttaggcttttcttggttcaacctgatggactttccttgtttttgatgaccttgacagttctgaggaatactagtttggtattttgtacagtgtgcttgcactggcatttgtctgatgtttttctcaagataggctggggttatgggtttttgggaagaagattaatgggaattcacaggtttagagactacagctccatttgtcatcactcaggtttccaaacttggagttttctttactggctgcttcttgtctcccagaagccagaccactgagagctgttcaagaatggcaagaagaagggcgtaccagccaagtcctgacagtttaccgaggcaacgtcatctaggttgtgtatagcattcttgttttcacgtctctttagttaaaataaactctctcttctttaaaaaaaaaaaaaatgcttgaggctattactcttgctttttataaattactaagcagggagataagctcacatgctgtaaagtacagttaccagttgctgtcaagtcgattctgactcatggaccccacgtgtgtcagagtagaactgtactccagggagttttaaaaggctaatttttcagatgtaggttgctaggcctttcttccgaggtgcctctgggcaggctcaaactggaggaaaaagctatttttgaaccctccttcacaccaaaatatttccacctgtaatttgcaaagatatcggtataaaaaataaaacctatcaaagacaatgagaaaaaaaaatctttatactcttgagaagggttggccttttacatctaacatttaaaatgacattaaagaattaccatatgacacagcagtcccacttttaggtgtacgtatacccaagagacctgatagcaacaatgctaacagacccacgcacaccaacattcactgagacacaattcacaatagccaacaggtggaaacaaccatggacagatgagtagataaagaaaatgtgatatagacacactgtggaatattgctctgccataaagagaaatgaagtcctgattcaagccacgcaaaaacgatccttgaaaatgttatgctgaatgaaataagtcaatcacagaaagacaaatattgatgagctcactaatatgaaacacttagaataagtaaatatatagagattagagttaccagaggtaggagagaaggagaaagaagggaagctttgtttagctagcactgagcttctgtttatggggatggaaaacacggcagtgaatctggtgacggtcgcacaccatgactggtgtgattggtgtcactgaattgtatgagtgaaaaatggtgaattggcaaatgttgttacttatatttttacaacaattaaaacaatgttttatgggcagtacagactttgcagtagagtcagagatatggaggacaagctgaaacaatctccaagaatgaaaagaaacaattttagagcagttgatgaaaaataatggaagaaatatatgaagaacaatggagataattacttcctgggagaaattaagaacaaataaaagagacatacaacatctaatgtgctaaaagaaagctttcccaaaatgaagatatgaactagcagaacgaaaaagcagccagaatgaataaaaaccagtacaagaatgtgtctgaagtgccatagttaattactggtggagctgtactctgaatctagacctgactgactcccaactcgtgttctgtctactcctacatctgtctcaagctagtcattagaaagaaatctctctacatgcaatgtggtagcctggagtgaatcctagagcacaaaagggatgtggaagaaatagtaaaactctaacaaaatctggagtttagtttatcgtaacatactaatgttcacctcttagttttgacaactgtacgagagttatataagatgttaacatttaggaaaactggcagaagagtatgcacatttgcaacatttctataactctaaaattattccaaagggaaaagtatatttaaaaagtaaatctctcaaaataatgccttgggtgctatcttaaaacttaacaatgagggaatatttattacaagtataaaaataaaggatttttttctgcattaaagacttgtttataacaggtttcttgagtattttaaaaataaatgttggcctcgatttaattatctcttttagaaaagatttcttatgcaattgcttccgtaccgtttttccgttcatctggattttaaaaaggtaaagtactgtaaatcttagtgtttacaaacataaggtgatctggttgtgagaaagtgctttccatttctactgtagatgtgacaaaagttctgggcttgtaacagcaagaattaaatttagaggattaatagaactgccagattttaggagctgtcagattctgagagaatcaggacttcagaaataaatgaattcttggagcagagaagctgaagcatataattaaacagacactcagaggggtttgactaggtaaggaaagagggagaaaaaattactaagaaagaggggagaatataaaataaaggaaattaatgaaaattagggtttatggcacctctaaggaattgagatgtgataaattacagaatgggggataatagtaatatgtatagtgttagatcatatcattgcctccctcaaagccttcccatggctctcatcactcagagcatgaaccagagactcatgggggccttgctgacctgcccccaccacttctctgactttatcttctacagtcaccttcgccctcacttctctccagccaacctcttctctacgaacttcctcagataccccagtcctttgtactgtctggaactcccttccctagaatgcttttccagatatccccagggttcactctttctcctccttcagttttgcttgaatattaacttttcagtgatttataccacgttgtcgttgctattgttgttaggtgccgtcaagtcagttccaactcacagcgactctatgtacaacagaacaaaacaatgccctccactcctgcaccatcctcacaatcatttctatgtttgagctcattgttgcagtcactgtgtcaatccatctggttgagggtcttcctctttttcactgaccctccactttaccaagcatgatgtacctctccagggactggtccctcctgataacatgtccaaagcatgtgagacaaagtctcatcatcctcgcttctaaggagctttctggctgtacttcttccaagacagatttgttcgttcttttggcagtccatggtatactcaatattcttcgccaacaccacaactcaaaggtgtcaattcttcttctgtcttccttattcactatccagctttcacatggacagtgacacagtgactgcaacatgctttcgcatgcatatgaggcaactgaaaacaccatggcttgggtcaggcatgccttagtcctcaaaacaacatcagcatgtgctattcaacatggcaaccccctagaactcccaatcccccataccttgctcttttatttatcacagcagtgtccaccaggtaacattttaatataaccagtcagatttttgcctctttattcattgatgcttatttagtgcctagaatagtgctggacacctagtaaaccaaaaacccttgagtcagttcctactcatagtgaccctataggacagagtagaactgcccaacagggtttccaaggagtgcctgcttgatttgaactgaacttttagttagcaccccagctcttaaccactgccccaccagggctccagacacctaataggtatgttaaatcaataaataaatataatttttcattatcatcattaaaataagggtaataaaacactggtaactttttcaggattattttttcagcaataaaccttttgcttgtttgtacttcctgggtatttttctacactgaacaattacttctataacatctttagaaggacgtcagaagagactctgaaagttgctctcgaatatagagcagctaaagtgaaaggaagaaatgataaagtaaaagagctgaacagaatacttcaaagggtggcttgagaagacaaagtaaagtattataatgaaatgtgcaaagacctggagatagaaaaccaaaaggtgtcactttaaggactaaggtgtacctgaccaaagccacggtgttttcaatcacctcatatgcatgcagaagctggacaatgaataaggaagaccaaagaagaattgatgctttagaattatggtgctggcgaagaatatcatggactaccagaagagcgaacaaatctgtcttggaagaagtacagccaggatgctccttagaagtggggatggcaaaactacatctcacatactttgcacatgttttcaggagggaccagttcctggagcaggacatcatgcttggtgaagtagagggtccgtgaaaaagaggaccctcagcgagatggactgacatagtggctgcaacaatgggctcaagcatgatgactgtaaggatggcacaggatcaggcactgttttgttctgttgtacacagggtcaccatcaataggaactgactcaatggcacctaacaacaacaacaaaacagtcagctgtgtaggaaaaccgcaactcaggcccaaaaaaccaatacttctgctgaaaaactacgcacaagccattgttttatcataagtggggggaaaaaaaaccctggtgttatattttcatcttaaaggtgtcagcagcagttaaatccacacgtacacattccctgggtcaccagacagccctctccgatgttagcatggcacacgggcagatattccagcaaagacagtctataaaatgaagttgctataaaccaaaacaaccacattgatttttagtacacttcaacacacaagggaacatcagtttcctaaatagcaagggctgaaaacgacagggagaaatacactgcaaacagtggaaaggagaggataaaagatgattacattagcaaacatcttcgttcttttagcagtttgttttctaagttcaaagaactgagaggcatgaaataggtggaactgtcctcatctaaaaatctaagattgcccatttatgaacattgtgctcacagccagaagcctgggtatccagtagacatttacaaactaaagccagataacctttagaacaccctcttcagagccaagtgtgtgtgtgtctctctctctctgatacacacatagaatctttgtcacacaatctctttctcacacccactcacaatatctcttatacacaaatagtctgtctttcatacacacacacaatctttctcatacacacaatatttctctcatacatacacacaaaaaaatccctctcgcccctcaaatggcagaactgtctaaattacattataaacatgtcatttaccaaaagatcattaagtttgctataagcaaacttatatcgttaatgagacaaaatgcttctcaggccagggacctaggaatgggaggttcaggatcaggacagaccagcctggacttaccatggctccctcacttctcctttgggcaacttctcgctgcaggcgggccacagccaacttctccctggagaaacaaaagcacaggttaggagatcattcttctcagtgtagagcccatgctggcatgactctgaaacattcttgagaagtctccagaggaactccttccttggttgagctcacttcctccactctcctttgtataactatttaaagtgattgatcattagcgcattgttttcatcaagtgtcatgaagattttttaccttggattttatataataataaccaagtaagtgtttaatgctgaataaaagcaccacttaagttcactaacatgtttgtaaataaatttttctacgattaacatatttcagttgttatttctacattaactttgcttacatagtttcaattatttttattttttttgctgtctatactcatatcaaatttaaaaacaaaacaacattccataccattctcaaaataacaatggcaaaattttaccggcttgctacgtaacaggcactatgctgggcatttctacctaatctcataagtgagcttgacgaccaccctgtaagtgggtttattattcccattttacagatacagaagctgaggctcaaagaggctaagttacttgaacaaacccccaggtggtagtatcaggttcatagtttaggtttcctttactacagagcctaaataaaaattttacatatccttttacagggtctagcaaatatgaaaatacagattttaaaatcatattctttctttctatcagtattccttattttacaataagattcactgtatattccttatcattgtaattctaattctacttacaaaaaatctaatattcaccaaacattataagaataaatactattgtaaagcaataaatatctacattttgagcatcttttcagttattcttaaaacaggtgataggtgaagtagggaataaacgaacactcccagtaattcccaaatcttaattttaggagggagttcccctgaacttcttctatcactatcgagacattaaactatattagtggtatttcacaccctagctgtccctttgtataggaccaaccaagaccaaaccaaagccattgctatcaagtggattccaactcatagtgaccctacagaacagagaagaactgccccatagcttccaaggaagagctggtgaattcaaaccactgaccttttggttagcagccaagagattacccactgtgccaccagggctcccatataggaccaggtaagtgacaggatttctcctctcctaactatctgggtctttaaaatgcttttgaaagccaagaagacatgtgcattagtttggttaatgctgagcagcattttagtataaataaaaaaaacaaaaaacccattgccatcaagtcgattccaactcatagcacccctataggacagagtagaactgctccatacagtttccaaggctaaaatctttatggaaacagacttccacatctttctccctcgggagcagctggtgggtttgaacagtccatctttcagttagcagccgagcactgaaccactgcaccaccagggctccttttggtatgaatagctgtactgaaataaatatccgagggccctaaaaacctaaaaaaaatatccgaagacacagagtagaaaaagggaatcggaaccacggtactgttgaagggcctggggcaggacctgcgcatgcgcctcgtaagaaggggcagcaaagtagatgggaagaagtgacaaagataaaagccttgagcttctttttgaggaaagcatggcaaagtccgcaagtgttgtctgacccaagtcctgataagcagataaaaggacaaacgaaaggagcgaaaaattcaaagagaagaatatgagtgacttccagtttaacatgaggaattaaacacacatttatctctgctctcttcagaagccattacaaaggcagtaaacagttaaggatggtaactagtcataaggacaagaaaacagaaaaacacacactatatgacccagcaattccgctctgaggtttaaaatcaatagagatgcatataaatattcaccaaaagacatctactagaatgtccactgaagagctatttgtaatagccttaactaaaaatgcaagtatctgttaaaaatataatggataaataaacgtttgcaaagtcatacatttgaatactataaagcaaagggaatgaataaaccaaacccaatcccaacatatggaatatcatgtatgattgtgtgaaagaagcaaaatttttaaaatactttgattccatttatatgaaatgcaaagatgagcaaaacttctacccagctcaataagacaagaaaaaagaaataaaggatacaaagaccaaaaccgaagaggtaaaactgtctcaattcagacagcatcattgtttacataaatgaatttaataaagtcataagacagaaggttaatatacaaaattcaattgtatttttatatacttgcagacaacaactggaaaatgaaattaaaaaaattcatttataatagtgtcaaagccataaaatacttaggaaataaatttaacaaaagacttttaagtctgctgcactgaaaactacaaaataatgctgagaaaaataaaagaagacctaaataaatgaagagatacaccacattaatgggctggatggcttaatattgttaaaatgttaatttgaaccaaactgctgtatagattccatacaatcccaatcacaatcccaccaggaattttatggaaattaacaaactgcttctaaaatgtatgtggaaatacaaaggactcagaatatacaaaaaggtattaagaaataagaatttaagatttgcttgaattcaagctttagcaatcgggaccgactaatgaagcaatggaacagacacttgatttctgaaaaatagttacttgttttttgacaaaggtgtcaaaacattccagttgggaaaggaaaatattttcagcaaagggtgctgttacaactgaaaatctgtacagaaaacagatgtgaatgacaacccctctctcatgtacatgtattactttaaaaacttttttaaaaagtatgtatttttaaaccaaatggttgacttatttatttatttatttatttgaacattagaataatatattacaagagaaagaaagagactgagaccacaacaccatattcacaaactgaagattcagcaccaagtgattcagggtcataattctgaaaaaaagaacttgctgaaaccttttgcaaataaataaaaataagaattaagtataagccccatggagtctttggatacagtttttataaatacatactatagacattttacggtgctatttttaaagttttttacattttttaatgaagtataacatacacagaaaatttaagaaataagtgtacagcttgataaatacaaaatgaacatgtccttgttactatgacccaagtaaaaaataaaataaaacactatcagaatcccagactcaactctcatgctaacaatgataatacccacttactgccaccgggtaaattctgactcatagcgaccttagaggacagagtagactggtgccatacggtttccaagactgtaaatctttatggaaccagactgccacatctttctcccacaataattaatacaacagtacctaaacttgtttgccacattgttttctctgaatactgaaacatggtggcctctacatactatcttataggtccctcaattgtttagtagatctcttcctctaaataagatcataaattcctctgtgatcacaacagtggcagccaaaatggtggttgattccttttggaagatggtcagttgtgatgtagttacaccagtccactgaaacggctgaatgtggagatcatatttacaggtattctcctctatagcacctactaatcgccacttaataggaataaatgttcgtggtttgctaaatgataaatcagttccagattccaaccaatttgcctagtataagagaattttaataatagtgccattttgcatttacatgggatactacacaatacacacacacacacacacacacacaaactgattgcctcagggcaccttttggttctggctggtgaattttttagccacttctaaaagcataactttcatgtgctcactttaacatagtaaatttttatgaaagagcactgaatgtgaggacagtaggacagcagttcctaaagtttttggtcacaggacccctttacactctgaaaaattattgagaactgcaaagagcttttgtctatcaatatttatcacattagaaaggaaaactggttatttaaaaaaaaattaattcgttaaaaataataaaccagttacatgctaagataagtaaaaccttttttttcctttttaattgtactttagatgaaggtatacagaacaaactagtttcttattaaacagttagtacacattgtttgatgacattggtaaacaaccctacgacatgtcaacactctcccttctcaaccttgggttccctattaccagctttcctttcccctcctgccttctagtccttgccccagggctggtgtgcccctttggtctggttttgttttatgggcctgttagctgaagggtgaacctcaagagtgacttccttactgagctaaaagggtgttcaggggccatactctcggggtgtctccaggctgtcaggccagtaggtctgctctttttttgtgagttaaaaatttgttctacgttttcttcagctctgtccagcaccctctactgtgatctctgtcagagcagtcagtggtggtagctaggcaccatctagttgtactggactcagtctggtggaggccatgatagatgtggtccattagtcctttggactaatctttcccttacatctttacattttcttcattttcccttgcccccgaaagggtgagaccagtagagtgtcttagatggccactctcaagcttttaagaccccagatgctactcaccaagaacataaaacatttttctttataaactgtgttatgccaattgagccagatggtccttaagaataagtaaaacatttttatgaaaaaacaactatattctctaaacacaaaataaattttatgagaagggtgacactgctttacaattttgctgatgtctttaatgtctggctcaacagaagccagctggaacctcataactacttctgcgttcagtctgtgtgacagcacatatcaggtagcttttagaaaactccactgtatattcacgaaaaaatgtgagttaaaaaggttaatgtcaccttagtgttaaccctcccattacctttttttttttttttttggatggcatgttttcagtattggaatgcatgtttactaattgagtgtgtttgaatttttggttggtaatatggattgtgagaaatatgtcctggcaatacattctgccactgaggcgagtggcaccttggcaccacccatctgtggtatgacagcatgcctctgatagctaggaagataattcattgctggtgccttgccagtaggttacatggggagcctctggttttctaaatatgacatagaaaaaccaaggcaaacacatcagggctccctatcactcaggaaaaccataattatgcttacaagtcttacctcacagaaataaaaggaaaaatgcaaaagtttataaaactaacacatccaagaagtatcacctaatagaatgctcaacctacacaacaaggaggctccaactcaggtttacagagcttcaggcatttcaaaagggacccactttgatgctaaatgcatagaaccagaataatgccttacccctttggtctagaggcaaaaaaaaaaaaaaaaaaaaagtggccagcatatcatttgggccagtggtaatgaaaggtttttaatttgaaaatagttttgaccttcagatcccttgacagggtcctggggacacgacacccaggtcctgggaccagccacactttgagaagttcaactagaagatacatacagaacttggaaaggtgtcctggaaattttccttgaactatctttcctaattgcggtatcttttttttttagataaagattcaatatatatgctaatagcatgttaattcttcacaaaaccagttcagcatcaaagagacatttctgggaaccaagtaggtgcctatcttatcactatcatcctgctaaattataaaagagtcctattatggtataaaggttaggagtatcacacttttatccttaaaataggctgcctttataatgaatattaggaaccatcacattgttacaggtgcttgtcaaatcttattcaatttgaaagaaaactgtaatggttttagccattatatagtttttaagaaggaaatattaatgaaacttgaaatttcatggcctgctcacacattgtatctttagacgatcaagaaagaaagacagagtgaactaccatgaaagtgtcatctctaatgtggcagcatgttagtcgcttgatttggtgaaacagtaaaatatgtagcaattagaaatatcagttttgtttttaacctaccatgacatgaatagagatgtgtgatgtgaacctggagaacgtcacagtagtctgggtcactggaaagacaacaccagactctaaccctgctccttagcgctcacctgacaagttggaaaattgcttaaatttatttatttgagtgcgatcctgactcatagtaggtaggtgagcaagatttgcaaaaataagtacaagtaaaagggtttggactaggttctgcctttgttttcaaccatttacgcaggaaaggcaacacagaatgccctccctgggacagggacctctgagggttccaagtaactgtccaaggtcctgtatgcagtgggtggacaacaccagtgctagctgagtcccactaaagcaagggtactctaactctgatctattttatatattgggcttcacaatcatgtttcctttgaaaagagggttttgatgctaaaaaaaaatttttttttgaaggattctttccttaggttcagcagtttctatcttccaaatattttgatattccatgagtgtgcattttatgtcatcaggtgcagtttttcaagaagaatagcattttatttttatatgaaagaagagtagtcattatttgtcagcactaaggaagtgataaagctgttgaatgggtgaaagcatctatgataaaatattcaagatttctgggtgttaacatttctgggctcaaattatcagctcgatcaaagtattaaaaataaatgtgtctgtcttttttccagtaatcttgattttccttgtgttcagtagtactttggcaaaccatctcttgaagctcccatggtccctatctgtgtaaaaccaattgggaccagcatctttttcatgcaaattcaaggttctaaaaaacagctttgtgtacaaaataaagaaaaagaatacttgactggcatgctacccaatgcaaattaaaacactcacacacacatacactcttgctcctatttgaaggccttagttcatttgctggaaacagacaactgtgcctttgcaatgcctcactgttttgtgtcagtggcaaagctaggagcttattatgatggggttatgggctttatgattccaaaacaaatcccagggatgtgtgatcaagagctgtgcatcctgagttacagaataggggtaaaagatgaatataaagaacacagacacagtgaaacaagaccatgacacttctgctttagttaaatgcaaaaagaatttttccctccaagaggattgaaacaaagctactcttcttattcaattttatgcccaaatggagaattagtccaagctttctcaagtcctgaaaacagccccagacaatcacaactaaaggtaataaaaagaaaataacaataaaaaagccttttttttttttttttttcaatgtaaaccttggatcttcagaacaccacggactcatctgccagttaggcccatgggaggactgtctgcaatgaagccaaaaggatgtaggcattggtgagatccagaaaaggcctacagggtttgcatgtttagaaaatgttccccaaggagaatgcagctgacaaagagggcatgtattcagtttgtgatgtgtggagacctcagacctaagagcacggcagagccatctgttgcatggatgtcgaaggcaggccagcctggagacaaatcagtgtcccatcagcactgtgaaggaagcccagcacacccgccatcctgaatgggtgagattaaaggtactgcccgtcaccctccaccaggcagatggttacccccatgacgacgtcctgaggggggagcagccctgccattcagtgtacatgtgaagaattctttctatttattataagtctattaatccaaactactctctacataaaatgtatttgaaggtgccgttccaaaggtaccactgtaacacatcaataggctgccaatatattactgtgtattttgatgaaactgctgaatattttgtgttagttctacttgacaggaaaccctgatggcacagtggttaagtgatacgggcactagccaaaaggcctgcagttcaaatacaccaggtgctccttggaaactctatggggcagttcgactctgtgcagtggggttgctatcggtcagaatcagctcgatagcaacatttttttttctacttgacatctagataaataaaatatgacaaacacatgtacagtatacatactcatatatgtatttaagaaattaaaaaaaaacttcttgggatccgacaaattcaaagttaatttcctttactgtgataaaggtactgtagtattaaagaatcctataaagattctaagttcatgagagttttgagttttacgttaagcttcgatattctgaattattgaaaacttacatgtattaggtaacatacaccatctgtagctatctttattcagaatattttgtttatagaagttatattatccagtgatgatgaaaatattcattcattccatatacacttacttagtgagtttcccataggtctggcacatttctaggcaatgggaaatacagataaatgagagcgttcgaacctcagaaagtacacagtatgacaacaagcaaaactaagcagattcttgtcataagatgcaagaagcacaccaccacaaagcactatattcaaagcagcattttaaaatgaattatgttggtgacaattttcttacaagaatgagttgaatttcctctaaataggaaggcacattctgttatttctaaggtaatttttttttatttcatactttttagcaagaagtcacataaaatcccttgaatccgttgctgtagagttgattctgaatcacagcgaccctataggatggagcagaactgccccatagggtttccaagtggtgcctgctggattccgctgacattttggttaacagccaaactcttaaccactgcaccaccagggctccgacaagtcacaaaggagaactaaaaataaatatgctagttatgaagaatctctattatatgttttaatcctactgttgcctaaatgtcttaagccttttgaatgaaatgtcattacagcagagtttagctccaagctctgtccctttggtgctatgattttattccaggtctcctctttgagagacagtcaattgacatctacaggcttttctactccaatacatcgttatcaccacaccctcaatttaaaaaacataatactagtggctaacatttattgattagttactatacgccaggcactaacccaaataccttacatgaaatatttaacctcgaatgatcccatgtaaggtatcagtatcatcttcattatacagggcaatggttctcaaactttttggattcaggaccactttacatcctgaaaaatcattgaggaccccacagagcttttgtttatgtgggttatgccatccatatttaccatattcaaaattaaaactgtgactttttaaatatttatcaactcattaaaaaaaaataataattctatggcatgttaatggggttaacatgtaacccacccataaacaacatataattatgaaaaataactgtaagttccaaaacaaaaaactggtaagaagtgtgacactattttacacttttgcgaatctctctcattttgtctggcttacaaaatcacacttagattttcatatctgcttctacattcagtctgctgcaacatcccacgtctgcaagcctctgtgaaatgccactgcatgcctgtgagacaatagaagtcaaaaaggaaactagtattttttttttttttttatgaaaacagtttcgaccacatacccccaaaaaggaaaccctggtggcgtaatggttaagagctatggctgctaaccaaaaggctggcagtttgaatccaccaggtgctccttggaaactccatgaggcagctctactctgtcctaaacggtcactatgagttggaatagactcaacggcaatgggttttttttttaaccccaaaaaggtcacagaatcctcagaggccctggtccaaagtttgggcactgctgatgggtagtaacatatactttccgtgaagaaactgacgttcaggtaggctggaaaatatcccatcatcccacaaaggaggtttaaatatggccattcgtattttttttccaaatttggaaaatagcaatgaatatacatttagttaaaatcacatttgttaaaacttatgccactgtgtccatcacttactaccactacctctaccctagggaagtactcaaaaaatataagagatatcaggatctccaaagacaaaatacctccttgaccattttaatgagattaataggaacaccactcaccaatacaattttacaggaacacaatgaattccaagtactattaacctgaatttctggaagagtagaagaaaagtactaagcaaactcccaagataaacctcggctcagacataggttttgttcccgttaacatctccactatttttttttttttttttcctgtgaggacatcactgaatgccttacaggaaactagatagatgattactctcattttataccttgaggcagagtcacactctaaaatctaggagaaaaggttcaataaatcatcagtcttccccacgtctcagcaggcccaaagggtaagagcgcagttgtgatgtgggtgtgagtgtcaggagaacaggtctgctcccacaaggaggcccagaaccattctctccacacacaagcatcccggggagtcacccgcagcagaggctcgacaatgccaagtgccagtgcacctgtcgagcaggcagatggagagaccggtggcagcagccttgagtaatggagaaattaattagcctttccaaagcagattatttaattactcatcccctccaatattcagggtgagagtggattttagagaaacttcagccacaaccaagatgaaactgtctttataaaccttttccaatacataatgccagttttgccctcaaaacttgaaaacaccaaaaattactctcttaatatacgtgctaaggggatctattagtatccatgatggggctaagtcagtaagtctagagtgctatctaaattattgacctttacacgatttggggcggcaataactagcaatcagtatgaaactcaacgagactgatacgtagaactgaatgactttgggagttgaaggttaataacattatgctgtgttgattaaggaatgctaaaaaataaatagttagatattcagatttttttttaatttggtttgttggaatacagggataattaataaaaacaaacacataaaaaacccgtattttaattctaaatttctaaggtcatgctcatccttactttctgcagcatctaaaaaaaaaattttaaactatctaagtccatacctaatacacatattctcaaagctgctctacgctgaatgctcttccactgtccagaacagcgcctcaggtgacacccacgttttcatgcatttattcgctgacccatccctatggttactcctgaagtctactatattacagttgcctgcttacctgtttctctcccttcttaggctgtaacaccccaggggctggggcttcaccatctttgtgtgtccagggcacaaagatatcctcagtaagtgaaagatcatgcatcaaggccaagcctgcttcacagacttgaagcaagaccacaaggcttatggagaggaaaaaacctagaagccgccttcacccatatccaggaacagaggttagttacacactccagatacttacaaaatgtggcaatgagaccacaccagccaccggtattccctactactatagtcatacctgtagcattttgtacattttatttgcaccgtgtactcatgtaagtagaaaaatcaaccaatgaatatctcatctttctagtttttctctttttaaattttgacttggaaatcttagctttcactagaataatacatgctttcatcctgaaacattttacaaatccaacttctaactttatttaacacaatactgaattaaagcaattcctctctttgtttgaggcagtgaaatcccaagagctgcctaatgtgtttctaaaatacatattagagcaaaaaattccactaactttaatacagggatttctagtctttactcttacgatatcctctttcttcattgtaatatcagttcaaggtcttcacaaaagttttacttgagatacattttttatgaatcattgaagaaccactttattgcttaaacttgattttcacttctgaaaactcagattgctgaactagggttcctagtgtttccatgttttctaggaaacttggaatttgttttctttttattaaaaaagacacagaggcagaaatgggtagggaaaaacgagaggggcaaagagcttgatgtctaattcaccttgatgagtatttgaaggaagcaattcaccactttctcagaaaaatttctctacatacagctggccaaaataaaggattccaaaggaaagaggctcctccccacccggctcagagtttctctgatctgaagactggcgatccacgtctgataagtaggatcacagctcccaagagcatagtggaaagcaactgagttgacaagagataatattagtaattgctaacagttctatagaggttaccacgtgccagacactatatctaaagagttacatgtgttaactcatttaattctcgtaattactttgggaggtagtaagaatttccattttttatagatgagttaaacgaggagccaaagaaagggttattatgcattgaattgtatcccctccaaaaagggatgctcaagtcctaatccctggtagtggtgaatctgactttgtttgcaaatagggtctttgaagatgctatcagttaacaggaggtcatgagtccttggaaactgctgaccttgcaagcacttaaagcactcagttgctggctgggggagtggagaggttggaggttcaagttggcatggaggcatcttggaggagggacctggcgatctgcttctgagaagtcagcatggttctactctggcgtgtgtggggtcacagagagtctgagtcaactccatggcaactggttttggcagtgctgtctgaaagaaataaaatgcaagccacctatatggttcaaaattgtcttattagtcagcagggcaaagttttcctaccctgtttccataaaaaagaattttccagtatttcctctttaaatattacaatcccactaaaaagataaacatatatatggcagttaagaaaaatgctgtaaaacaacataattttgtggataacatccaattttcttccaccgacttttggtagcattcaaaaatgatgggctatttgtagcttattacagagggggatttcttaaggaaaagaaaacatatgctaaccatctcctcaggagcattacacatctgcggttgtgtgtgacaacagcccttatgtgggaactaaagtagtttccatggctttccattgtcgatggtcctgaaatcccattctgcatctattttgatgaaggccccaagatagtacctgtgagtagactcaagccatctgtctaggttcagaaaaataagacttctaagttttaaaacaaagaagttgaaagaggtaatgaagaaagtttggtggactataacacagcaaagtttattttattacaccctccctttccttcattcatggatgagtcacatacaaaggtaaattctgctcaacagaatggtgatttgggggatagattggtaatgccaccaattcattccacagatactgcgctgcctcctctgttgtaggcactttgctaggctctttgaagaatacaatgaatatggctcactacctgcagccagggagccccaggatggaaagtacattttcagtagagggcgttaacttctgaccaggagaatcaagggagcgtttatggagaaaatagcattcacgtttcactaaagttaagagccataaaaagttagaagccaaacgtggaaagttatatgtacagaaccgtaaacaatttaccacacaactgttctttaagttttttcagtcgaaggagctcacctttttatattccatttctcagtagggttcaagaggactacacgaatgattcaaatggcatacttcacatctaaacctccacaggtgtacattatcttagctgtagacatatttttagcactttcatcttcatattctttttaccaagtctattgatatacctagtatgagataaagtgctgcctgggggctctattaggagtacatcgacccagttggtcttccggagtggtggtggttgttgttaggtgacatagagtcgctttatgtacaacacaccttagtcctcaaagtgacatctttgcttttgaacactttaaagaggtcttttgcagcagatgtgcccaattcaatattccacctgatttcttgaatgctgtttccacgggcattgattgtggatccaagtacaatgaaatccttgacaacttcaatctttcctccgttcatcacgatgttgcttattggtccagcagtgacaatttttgttttctttatgttgaggtgtaatccatactgaaagctgtagtctttgatttcattaataaatgcttcgagtcttctttgctttcagcaagcaaggttgtgccatctgcataatgcaggctgttaatgagtcttcctccaatcctgatgccgtgttcttctttatatagtctggtttctcagatcatttgctcagcatacagattgaaataagtatggtaaaaagatacaaccctgacacgcatccttcctgattttcaaccacagagtagcctcttgttctgtttgaacgacgcctcttggtctttatacaggtccctcatgagcacaattaagtgttttggaattcccattctttgcaacattactcacagtcaaatccctttacatagtcaataaaacacaggtaaacagctttttgatattctctgctttcagcccagatccatctgacattagcaatgatagttctttttctacatcatcttctgaacctggcttgaatttcttgtagctccctctcaatgtagggctacaatcattttttaattatcttcagcaaaatttcacttgcgtgtggtattaatgatattgtttgataatttccacattttgttagctcacctttctttgcaatgggcacaaatatggatctcttccagtcaaccggccaagtaggtatcttccaaatttcttgtcatagacgagtgaacctccagtgctgcatccatttgttgaaacatctcagtaggcattctgtcaattcctggagccttgtttttcgccagtgccttcaatgcagcttggattttttctttcaataccatcagttcttgatcatatgctaccacatgaaatgtctgaacatcgaccgattcattttggtatggtgctctgtgtgttccttccatcttctgggtacaaatagacatacaggctctctagttgaccccttattacaaggccatacactggcctctcctgagtggtgaggagttaggtgacatgtggccttacaagtagtctgtctagagagagagcttatatccaggctctcattaactctacccactgaaccattcttaagcctctggtgcactataaatttactgatttttataaaccattcaacttaataaccttccccaaagcactcagtaagagtaatttttgatgctttgatcctctgccaaatcatttttatgagcccataatctatcagaaccaagctcacttaagttcccttcagaatgcttttcaccatggagtttgttctgttcagaatgcttttcacccctgagttttgtgacccagtcagtcagattcttctttttcaatcttttcatgtgaattgtgtgagaagtttctcctgttttgaacagcaaaaacaaactccagctataaaaagcaagatgaggcattttatgaagaggttatggcatttcaggaagaattaaaccaccaaaccccatgaagggcaggagccagggtacctctaggaacctccgcagcaagactttatagaccttctgttagatgctaccatgatgctctggctcagctctgggtactcctggtttctcttttccaccagttctacattttaaattatctggagtaagatcctgattggcagagcttgggcgagacgctcactctggatggttcagctttggtcttgggagccaggacataaagcatagccttggacatgcccttctccttatgagttgtaggctgttctcagagaagaaaacaatagcaacagtctaccacgtgggctgatcatgtggacttcaaatgcttgttcttactctggaaaaggttgttttgttttattatggtaagtatgtatgttacaaaacatttgccattttaacattttttacatgtacaattcagagacattaattacattcatcatgttgatcaaccaccaccattattcatttccaattttttttatatctttcctaattaaccctattagacctgtagcaaaaataaacaaccagcttttttttattcaacaaaataatatttgcatttatttcaactagactaattctatttgaggtttccccgtaaaatacttagctagcacttgcttttttatgttgtgttgacccctccaccagcagtgtgacttaaaaatttatattaagcatactcttctttcttccttctggaatacttaaagagcattttgtctgtatcttgctttctttatactgtctcaatgcctctacttaacaatgacttcacagtttatattgaacacattcccagaagtgttatcaactatgaaacactgtgcagaaactttaaaattagaccaagagataacactcttaggagacacaaaaacaaatcagagagcaacctcctctttcacttcctgtcctttacaccagtatcatcatcaaggctgttcaaaataccaacaataagattttaaaggacatgggtacttttaaaagagtgccaatttagaaaatctagagaataaaaaagaaactcatgcttccctggagtctttgtaaacaactcaattgtggccaaatacttataatattcaattaggatccgagctgacaagtagctaaaaagcaaccaaaaagtcaacagtgggaatcttcagaggggaaaatggaggaaactgataagaaaacagagctcgacatcaaagaaatcagaaacgaactgaaaccaatttgtgaaataatttggcatctattataccagattaagactctaaggggaggaaaaaattctcagatatatggccatctaggatattctcaagagggttaagtgttttagaaaataggaaagtgtagaatacgaatagcacaacaaccaggcagaaaaattaattctgtcaaaaaaaaaaaaggtattgtaaactttctgtttatgcataaataaacctaatcatttaaaattatccatttcgttgacacagtgagagaaaagaaaatcaacaaagaaataaagacctcctttgcatcttaaaacaagagaggggaaaggcactcagtgaacagttcaaagagctaacaacaacaacaaaaacattttctgaagtacagcagatgctcactcatcgtcgatgaagagcagatgatggctgaagtggtgagcagtggtctctcaactcattttgattacatttgagatagaggagtaggaaagaaatagtaacaataattaatactcatgagtgctggttatgttccacgtgctttacagttagttactaactcatttaatcctcaccccaaccccgaggtctgcactattattatccctattttacagataatggaattgaggcatagagagattaactatcttccccaaggtcccagagctagtaagtgatgatgtcaggatttggacacaagcactcgattccaaaatgcccactcttatactttacgtgatgctatcgacatacttctagctggagttacgagctctgcactgcatgtagatgtttgctaatatgaatgctaaaaagttcatatgaattacatgtaaagtgtttaaaattcattttaatttcctttgggaggcaactggaaaggcaggatagagctgtggttaacagaacagatgctggagcaagaaccacagctggctgagaatctcagctcttccattcgccagctaactgacctaggcaaagttaacctgtctgctgaagtgtatcattattcacaaatatgtactgtccatttctgtggggggactgtacttccccaaccaccgataccaggcctagcatgcagtttgctttgcccaatgaaatgggagtggaagaaagttgtataatttctgggcagaaactttaagatccaggacaagctttgccacagtgccttctctcattatgatcagcaatgtgcaagaaaggggctgtcctgggtcctggattaggatgtcttggagcagagcagtaggcccaccagggacatttagtggagtaagaaatatatcactactggtatgggtggcacaaatggtttgctcttacctacttactgaaaggttggtggtttgaatccccccagcagcgctgtggaagaaaaacctggcaatcaacttctgtcaggttataaccattgaaaaccctatggagcacagttctactctgacacacacagggccaccatgagttagaatcaacttgacgacaatggatataggtaatagctcactaagatttactataacataactgcttgtctagaccaatatactctttatccctcaatgttctacctgcttctaaggttgcagcagaaatgagttacccttcttatgcatgtaagaacagtggctagcacaggataagctctatagaagtgctaattcttataattattttcatatatgcatggtcagtatcatggattgaattgtgaccccccaaaatatgtgtcagcttggttagcccatgatttccaatattgtatgactgtccttaccattttgtcatctgatgtgatttccctatgtgttgtaaatcctatcgctatgatgtaatgagatggatcagtggcagttatgttgatgagatctacacgactcgatggtgtcttaaaccaatcccttttgagatataaaagagaaaaatgagcagagagacatggggacctcatactaccaagaaagcagtgctgggggcaaagtgcgtctctggacctgaggttcctgcagagagaagctcctagagcaggagaagactgatgacaaagaccttcctccagagcctaaagacagaaaaagccttcccctggagctgacaccctgaatttggacttgcaacctacaagactgtgcaagagtaaacttttgtttgttaaagccatccgcttgtggtgtttcctttataggaggactagatgactaaggcagcaaggaataaacattagcgagccagacacttacttcaaaacggtacaagcagagacaagaacgctagaggaaacattcccagtattaatcaaatgcttttctggtccttaaattctttcaactcagttactgtttgtcctttgggctttctggaaacttctcctcttcaatgctaccttctcagtgcagtaatcttacctatttgctgaaaactcaggaccttattactgcttacacaaagctccagacggttttccttctacaagattagtcagttaatttggccatgaaaaatattcctttcccacttccctcttttcccttagctatcttttttgaaaccaagttgaacaccacttttcccaaggaatattcaatcaaaaacaatttgagtaagataacaatatctgttgcctctttgtgtttaagggtgaaggatcagataagcctgatgagtttctttgcttcatgagttttgataggctgtgatttgctactgtgcaatgttttcatggtaaggtatcttgccaattcatatcccacgctactgatggccactccagatattttaataagcagttgttgaggcctcttatgcccaaggaaaagatattcagtttatcgtagaaatcacagctactaagtgggagcccaaagagatctttgacaccaacacccacattttggagatgagggaatgtagactcaaaggggttgagtttcttgttgagaaaaataagtcagttaagagcaaaaccctgattagaacaatcattatccacattgtcaaactagttctacctctgggactgattgtgtataaaagggaaacacgggtcatctgagaaacatgttaaataaccaacccataaactaatgcattccatgttgctttgcatatttgttgtcatcacctgccatcgagtcagaccctgacttatggcaaccctatgcacaatgggatttgacttttgtgatacacagggttttcactggctaaatttttggaagttgatttccaggcctttcttcctagtctgtcttagtctggaggtcccacttaagtctgttcagcatcatagcaacacacaagcctccaccgacattggccaagaatcaaacctgggtctcttgcatggaagatgagaattctaccaaggaaccaccactgccctcacttactgggttttaatctgtcccattcacaaaggccaaagaaattgttgagaaagatggcaataacagagccccgtcttactaagctcatatgtgaagcaagtttggtaagatgaggtcagtgtcagggcttatctacactaaggtgtaagccagggaccaagttattcactacaacagaaagctttgtttggaagttgcttgctggataaacaacttgccagcaatttgctctgaagtaatgatgattagaatggctatgaaatttaacaaaaaaatggaaagaggcaataaacaggatccatctttagaaaataaaaaataataatacaagtagtcatagctgcttttgattgtcaataaggcaagtaatatcaaaagttatccctaacactcatcattttactgatctctaaatttgcttctctaagagaaatataccaaacccaccaaacccactgccgccgagtcacttccgactcacagcgaccctatgggacagagtagaactgccctacagagtttccaaggagcgcctggcggattcgaactgctcacctcttggttagcagccgtagcacttaaccactacgcaagcagggtttccgagaaatataccagagattaaaaaatcacacaagaagataaatagaacagggaaattgctaaggggtttgttccctttgatgccccttaggccattttccaaggtccagaagaaaggtgttccctagagctttgtgagactcttagcaaaatcatctcccttacaactacataggtaaagaaagtatgtacgtttttagtggataatgataaaacagatttgtagctaaaaaaaagaattttttttatcacataagctttgtgttttctctgctgcttggctaagttctcatgtctaaaagacaaaagagaatacaaaacagaacgaaacaacgcaaaaaggatttcatgggtacctatttttttttttttttttttatatataagaatggtacaacagtcaaaagtcacaataaaaaatactgatatacaaagttaggagccgaagcacattcaaaagatcaaagcaaaataactatcaatgtcctagttagtccagaagaaaagaaaacccagccgcaaacagactctcctgcaaatggagaatgtctttagcacaatacaaaaagactgttgcatgtgacaccttgataaagaagcagaaacactgtcacaagaagaaaaggaagaaagggaggaaaattcacagagctcacaaaagatggataagaaagttttaagagaataccagcattgattagaggcaagcaagaaaaacaagatagctgctctatctgcagcgccccctccccactgctgcacatgcccgttgtattgtttcctttggcactgactacaagagagctccatcctctttctaataacactcttatttataaaatagaagaaaagcatcctgataagaatacacctcaatagcaaaaagtatccttctatataatctgagtgtacagatgaagaagaaatgccctttcaaagccgtaacaattacaaagcaaccagtgaacaagataagcatttgcagaaggagccacattgaatttattcaacgaccagcttttctgttctgtgagtccaagaatggatactacttactgggaaagcctgcagtggtgtaaaaatcagccagtgccagcatgtggcaggggggagggaagtgataaagaacaaagcctaaagagaaacacaggggaggctgacaatataatcccttataattcttcactcagcatactcattgacccattacattaagtcaatatggaagacacgaggttttgaaaattgcacatacacacatatttggtccctgccttccaaaagctacaacttgtacaacactatgttggtccatgatcctaccggtgcccattttgtgcaagtataaaaatagtatccattcctataaacaatgttatctcctattctggccagaagccccacattaattatttctttactgataaaaattatttctttactgatacagtacattatatcatatttaaataaaaatcaaaatacagtaaatattcttataagtccaagggtagaaccaatccgtggaatatggatgtttcctctttcataattttatatgcataatatgcacactaaactacatttaaatgccaaaaaaggctatactgatgatttgctggagctgggaaagagtaaaaaattccagaatgcaattagctagtccttactgagccattactatgcgccaaataccatgctgcatggttctacatgcattatcttatggaatccttacaaatctctcctttttacagataagaaatctaaccttccaactcagtaatccacactcttaaccaatgtactacacacatcctaactacaaacctacataggaaatttctgtgggacctgcttagttgttgactattaatggaaattttactttactgttgaaacacaatcaaatcaacaatgatctcaagaacccagcaagatttgtgtcaagaaaggccagacagcaaagctaggatcaggagaagaccccagccccaaggtagggcagatagtcaggagcactcctcacaagagttcaagtgaaaacgggcaagcacttcagtgcagcccattctggtagggtatggataaaggtgcagatttcaggaagtccagaatattgtgaaaggcaagtgtattacgatggggatttcaaggctggcagtcagctgaggcttaaagttcagggatagacagaactctaattcctgaaagcccttagatgaactgaagtacactgcggaatttcaagacatccatacaaagtaaggcaaatcagcaacaaatccaatttcaacacgcatctatgtgcttgtaagtttacttgtcaataaaattcatagtcattaaacaaaatattagctcactattctgtccaaactatggagccataaatattctgggtcctgtaagttctgccttgaaaaacggcaggtctaagtctctacacactgcccgtttgtcatattgtgcaggcttgcttgttgcagtgaggctggaagccagcccgccaatgtttcaaataccagcagggtcacccatggtaaataggactcagcaggatttccagactaagacaggctagaaagaaagacatggcgatctacttaataaaatcggtcaatgaaaaccctagggatcacaacagaatactgtccaacatggtgctagaagatgtgccccctacattgaagtcaccacacgatggccacaacaatggactcagacatgccaatgatcatgaagatggcacaggacccggcaatgttccattatgttatacgtggggtcactatgagacagagctaactcaacagcaactaacgacaactataacaaagttcctacagccctgattcttcatgagcaataagcactaggaacgttaactctggtattgactggtgtgtattatttagcacattgtgtatctggagaagtttgtcaggagcaacaacctaagatggttcttcagttttttttaattctcttccacctttgactcagctcttacaggctaagctgaatgttatgtaatcttctgggtattgatacttacacaagaaatgtagtttgccctacaaggcaggcaagtgaggatggcttctaattttgcttttaaaatatttatgtaaagttctttagagtgactttgatttttagaaaaatgacaaattttaagggaaggacaaaggaataaacatacttagacacaataatcaatacattcttaagaatgcatgattttgtatgaatagagacttaaatccctaaagcaaattaaccactaggggtggatgtgtaaagtcatggaccatgtcttcatgggtgcagtgctcgatgcacatcaggttctcaggagatgcttacttgaactgaagttactcaacagctgagtctcagatttctgatagttaaagtgaagtgatgatacctgccccaccagtggttcttaaaaaaaaaaaaaaaaaattttttttttttttttgttcttaggttcttagaaatgccagttaatttctaggtgaagtgaccagcatgagtgggcactcaaggaactgaatctacctaaaagcaaaaacagattagcacttggctgctaactgaaaagtcagaggctcaactccacccagaagtgccttggaagtccacccagtgagtagccttcatctacttccaaaaaaatcagccactgaaaaccccatggagcatagttttactgtgacacacatggggtcaccaagaatcggagttgactcaatggcacctttttttttttttgctcttgttcttttaaaggaaaactgtgtcctcataggtgtctgataataatatgatcaaaaatatcaaactcagatccactacactacatagaaggagacaggaaaactgaaattgcatttaaatgtatcatttaagacaatccattagtagatgcgggaaatattaagacaatcatttatgattaatcaaaaggcatctgggttctaggtagagttaatgtcagaaaatctgttatcaattctgctgttatttgttgttagctgccgtcaagttggatctgacttgtagagacactatgtacaacagaacgaaatacttcccggtcctatatcatcctcccaatcattgttatgcttgagcccactgttgcagcaactgtgtcgatccatctccttgagggtcttcctcttttttgctgacactccactttacgaagcatccttcaccagggacagatccctcccgataacatgtccgaagtatgagagtcaaggtctcgccatacttgcttctaagatttgttcttttggcaatccgtggtatattcaatattctttgccaacatcacgattcaaaggcttcagttcttcttcagtcttccttattcattgccgagctttcataggcatatgaggcaattgaaagtttcatggcttgggtcaggtacaccttagtcctcagagtgacatctttgcttttcaacactttgaagaggtcttttgcaacagatttgcccaatgcaaggcatcatttggtttcttcactgctgcttccatgggtattgattgtgggttcaactaaaatgaaatccttgacttcaaccttttctccatttatcatgatgttgcttattagtccggttgtgaaaatttttgttttatgttgacatgtgatccatactgacggctgtggtctttgatcttcatcagtgttttggtactcccattctttgcaacattatccataatctgttatgatccaaacagctgaatgcttttgcatagccaaaaagacacagataatcatttcagatgacattccactgctattcataaggtttcactggccaatttttctttttttttttaaatagatcaccaggtcctttttcctagtctgtcttagtttagaagctaggctaaaaccatccaccatgggtgaccctgctggtatttgaaataccaatggcatagctcccagcatcacagcaacaggcaggccaccacagtacaacacaccaggacaatattaacaccagcacaacataacacacaagcaccacagtatgacaaactgagatgagtggtggtgttaactctactaattagaaaatcacaactttttatgcataaacccttcaaacaaatccaatgaaaatggcaactcaaacctgagcatatcagtgacaagtctattatcgctatcggtttcaattacccagctctcctgatagtaacaaatagagggtttcaacacaaagtacatgtaagagcagaaattcaccaacaataaatgctgctgtttgttgcatcaagagaatttcctttgagaacatccctgtatttcttaattaaaaagctcttaattaattatgacaaacaaactatgatatcccagttttttatttagcgtaaagtgtaacaggtaactttttcttggtagatttaagaacactttaattcagaattcaccaatttggactttgtatgctaccaaaaccttagacaaatatttatctctgttctgtaaaaattttagaagaataaaaattaaaggagaaggaagttttaggacatcgttattatcaagaaaaagaaaaacttcaagattttaaaagatccttttgcgtacaacttatttacttattcattcaacagtcgttaattccacacacatgcattgagttctgctctgggccagccatcagaaattcccagaagagacacagaccagcctttctgaagcgcactgggaagcaggtgtgacaaacatctaagcaaacgcattgcagggtgataaatataactgaatatgtaactgcaaaggaagaaaatattaccgagctgaggctagtgctttgacaataaccctataaaggtgcctcatctcattccaagacagacattaaagtcaggcttctccaaggggccactttatcagattaccggttgccatcaagtcgattccgactcattgcgaccctgtagggcagagtagaactgccccatagggtttccagggagtacctggtggattcaaactgccgaccttttggttagcagccacagctctcaaccgctacaccaccagggtttcctttatcagctgagctcccattaacagggatacgtgcaaaagactgcagcgccgggtgtgtgtggagtcggggtgggaaaagctctcacaatttcaggctgatttgaaccagtacttcctgctctcactctcaagtcacttttctcatccgaacctcaatgtttctaaagtaaccgagtcaaccagaagatgaagatactaattctgccctggtgcttccggctggtcccagtcaccatcaggctgattccagctcacggtgaccccaggtgtgcagagtagaactgtgccccacgtggttttcggtgcctggtttttcagaagtagatcttcaggcctttcctctgaggcagctctgggtgggctcgaaattccaacttcttggttagcagacaatcgtattaattgtaccactcagggatttggcggaaaggatatccaatcacatatacgtattgttttataagcagagggaggtgagaaacagatgaaataggtgctaataaaattagggagccctggcagcatagggttgcctgggcagcaactagtatggaattatgtcctttcccagttttgagatctgatggttcatctatttctggctcctgaggggaaacagggtcagttgtgagaactcagccctccagctaggccatcgccaaggcggtagccacaaactcatcctctggtaagacctctctgggcagcaacaccaggctctctagattaccctagggtttcacagctgtagcgatagctctctcaatggctgtaagaggctctaggtatggggcggaagagaaaggaaatttctcgtgaaatggtttgtattgttgttcaaaaagacagatgcgctgtcttcttctggctctgcattttatctattttagcacgtactgaggtctcttcacatttctcacctgccagcctaatgagctagcagggctggtctcgggccagccaactagagcaaaattgtaagcaattaaatgtgatgagatgggtaaggtccatcaggtcaaatcagttaatataataaaaacaatcacagcttttatttgtagcatcttgtgccaaaagaactagatgcctgacatacattgtacgatttattccttatgagaacccactgacatagagaaggaagctgagcttggaaatatgaaaactcagatgtgcttactcccaactcttgcctccatgcttctgaggaggcatggagctgactgagaattgaagaagtagcacaggcatcaggaagtcaggggcagagcatgaggagttataggtcaaacagctctctggagagtaaagtcacagcagtcaggataggaccacagcccaagccaaggaggcactgctgctgagcacagggcaccactcctctgcccactgaccaatgggtccgtatttaaagtgaccttgacagtaaatttctacctgtgtttcctcccttagctgtctttagtgaggaccctatcctagacgttaaggagatgctgatgggaaccagaaagaatgcaaaggctggatgtctgtcagggttctggacaaaaggcacacaacaaaagaatctgatcatgacaccagagaatgagcagaaaatggaagcaaagaggttcaataaagctaatctcaacggcatcgatagaactttgaaaactactgatttgcttccaggatagatttaaacaaagctatttatttatgtgtgtgtgcaaacgcatgtgtgttttatatgcataatatatatgtgatatataatatacatgtgagcacacataatacaacacacaaacgatattacgtgtaacatagataacaaaactgtatatataaacactcatactaaactgtattattatattttatttgtgtgtgtgtgtatatatgtgtgtgattgttagttgtttactcaaatctattttctcttcttctgggcacagaggtaaactacatttccctgccccctttgcagttagggttccagccaacgaaatatgaggcagggatttttgctacccagaggcttggcccataataacctccacaaacggttccaaacagttttcctcatctggtatactgggatggagaggaaccctagagaaatcttggaaaccacagttttaagatggagcttccatcatcctgggtccttgagtaactatttggaggagagctatcccactgaatatgaaaaaaaaaaaaaaaaaaaaaaacagttctctcatacaagcaagagataagcttcttttgctttagcagctaagacgtgagagttcatgtgttaccacaacaagccgaccctgttacagagagttggaagtgtctcattttttggttaacaatgaagtctaggttattacaatctaataaattctactatgttttcaatacatctttcacacctctctcctgcctctgtgctcatctacctttctttctttgtatgaggtgtagccagatgagtcaacagaaagaggaacatttggtttatttgggatgacttctatcaacctagttccggagggcaggtgcccagacaggcaagcacgtctgtgagcaagcatgtctgtgagcgagcactgcttggagaaaatgaaattcctctttacatttccagccacatgcagactgtggtgtcattattccaaatctaaaaccaaacaacaggtacagccccaaaagaaacaggatctgactactcagtataacaagaagacagtagatacacaaaggtataacctgaatatttttagcaccatattacaagcctgaggttcagaaggcactttctcgaggctgcgaaaatacaggcagaagcctatctggaggtcccagcacctcaaaggaacgcggaaacattcttttagcatggtgtgcggtaaatatcaaatcctcgcttttcacttctctgctacgtctgtcctgacgccagctgtacaggcggcacttcctcatctgagcccaaccacagccagggctaggtcagacctcacaagtcacagagaccggtcctacaggccactgggtctgcccaagacctccgactccagctgcaagcttgggagtccccatgacaccctcacttataacctactggttacaaattcaggggttccctctacctcttcacaataccagccataatcgtgggggtccctagccccctcacttctgatctgctggctccaaatactccctgaatttgaaaatttcctaaaacgacttacagaactcatgccaagtgctatacttacgattatagctttattataggaagaaggatacgaatgaagaggcacataggaagatcttgtagggttcccaaagcagagattccatgcctaagaacaggacttgctaccctcccacagtcatcactgtccttcactaacaaagagttccacggagcttctgtgtccagagcttttattgagggagggggactattacataactcaaactccaacccctcacccctgaggctgatatcaccaggtgatctggaaatttatatcacctggtgggtgtttctggcctggccagaagagtcacctcattaacataaccagttagattagatgtaggatgaagccctcatcaagacacttagggtcactgaattccaaggttttagaggctgtctctcaggaaccaagaacaaagacaattcctcgggtaaagttaatataaaccccgcacacaggtctcagagagagtgaatttaatattttcacagaaactagagcactggatgggaagctagaccccaggaagaaatcatgaaatcacagctctgagaaggcatctaaagaaaatgccttatcttaacctctcttctttagtcaggtcagtatttctaccatcaactactgaacacttgtctcatctttccttaaaaacttccagaaagattcccaaacctttctaagcagccccagttgcgaccctcaaatgcaacaccttttttcttatttccaaaggcaatcgttctgccttctcgccttatttcattcctccctaggtatggtttcatgacagcatacttgatgacatgtagggttgaaagagcatttcaagtgtcagaaaaattgagaccctgcttccagttcttctaccacttcacttgtttcggacaaatcacaacctctttgggtgtccgttttctcaatacattaacattacaaagcaagagaatgggtaaaagagggtctcgaagtcccttcctacctcagtctagttgatactctataatgtatcttatcttctccaggttaataaccaactctaattctttcattagattcttatgttctatgtcaaatctataatgtaaaaacaggtttcaaactaccattacatagtcgatcatgctggattccattaaatatgaatttcttatacttgtcaatcaaaacagccaggtgcacttatcaaaatccatttaatgtatcatgtgctggcatcttctaaaatatattcacttattatgcttccaagaatttttaatgagcagctgcctcaaaactaattaatgtgtataactcgcactgtaacattacaagctaaatcccattacaaataatagagtttcaaggaacagttcaaattgcgaaggatagccagactctagctgatggcccacacccttcaaacctatgtgcatcaacaagttacagaggaatgaaacaaatagttctcatcttgctgtgtattttgaatataattttctgttcaatactaaaccacggaattctagcaaattaaggaaaccctatggacacctcatttcttcctggacactcttagccttttctgttatacaaacagatgacaggaaaatcagggaatccaatggcaccagctagattctgatttttcctacccaaaaaatgtctcaaaccaaagtcgttcttttacagtccattcatgatttccttcaaaccacactacctttcatttacagcctggtcaggtgctaaactccaaagcattcttgaaggaaaccacattaaggtaaataaagctgtaacgctgctttaccactcttttttttttttttaaatcaaaatcaggtgtaattgaaagaaaatgattatacacttttctggcacttgttccatttctgagaacaaatgttcagttacctaagggatgtttccacctggttctctctttttcagtttccattctttagatttaattattatacccaggcaaattaccagtatcttaccacctaaaattcagggcttccaactggaactggtttgttctggttcgcactcctgctgagaatttgcatttctaaaaaattcccaggcaatgctaatactgttggttagggaccaattctgagagccactaataaagcagtggttcccgaaatgtattatacataagaatcacctggggatcttgtcaaaatggagactctgatccagttggttgaacctattcgaagccctgctaaaaataaacaatcctgatcttattttttcaaatcatacataccaaaaatgaaataagactttctcaaatcatactttaacaactatgtaatctttaaattaccagaaaaagaggctatttcaccacagttttaggaatatataaatttcatcatcatcagaaagtagctactgattctagagttatacgttctacagttatgaacttggccaagtcaatagagtaccaccctctttaagcctaaaatccaaaggtaaactttgctatattctgagaaatggcaggataaaaaataataataataatagaataagatgaaaccattgattaggttcatgcttgacaataccttagaattggaaatcaaggcatatgcatttgtggttgggtaaattaggccagcacagaactgacaggaatcccaggactcactccaggagtgacaaaccctggctaccccaaagccctgggtgcacagcaaaaccttcagtccactgtccacacactttgccctggccatgcctcacttctgccaccaccaaagtagctgcataactcatttctttttcagttcatccagatggctggcgccctgtagacagactcagaatgctgactgtgtcttgggcatgcttattcagggattcttgaaagctattattcactaattttgtgtggaaatgaaatttcagcttcccattgtgtacaaataacttggccacttaccccacatacaaaaaagtgcttttggccaggtgggagtggacggctggaacgcaaagccttccaatgtgctgccctggctcaggcccaagctggcatatggggttccatagaccacttccatataaaatagtaggtgaacactgtaaacaaactccataatgtgatttaaaacgtgctcactggagggctaccatttgcttttattttctttcaggataggagatgaatcttattcacataaaagcattttattacattttgttattttgcatttgccctcccaacatcatcgacttcaacacatggccgactggctaaaactttggtctatctagacataatcatgagcttctaagctttcttaccttatcattttcctattctagaacataaacctcaacatagacatcactttctgtttcaagccaaggacaagcaggcaaaaaaaaaaaaaaaatttttttttttttttggctttcatagagcaagttaaatgctctagttaatctcatatactttgcttttgtgaaactttcccacactctgcttataaacaactattgatattttctggaattttattccaggaattgtttgcttgtttgcttttaaatgtcagaaaactctcctcgcctcctctttggggtctttcgcagttggcagctctactcagcagtaataaataaaaagtctcatgtagataacacactaacattccatgctttatctgcagagcgcagagtcgtttacaaacagtatcaaaatcactggtcatctccagctctgtaatctgacttttgtatcttccccagaagatttatttacatcatgcttgcaaaatataatttgtatttacaaatacgcgcatttatctaggacacagaaagcagatgcactgagtcatattctggggctgatactcatttccaatacaagtgcccatagacaggaggtaaaggctggctatggtgatccccttcttcccccactctgaggagtaaatagctttttctccgttcctacttttatctacccagccccatatctctctgctcctcccctatatctgcaaggggctaataaccctccttctttcagatattccaggaatgtggggttttttccccaataggccttctccagcttgtctcccagatcaatgaacttcaggatgaggtgagtgaaaacagatacaggagtattttggacattaaaaacaaaaataaccaagcaaaaaaatttcaatctctattttgaattactcatccatgttctgaaaataaccagtttgacttggtaaatgctgtttctcttttatctctctctttttttttttttttaacaataaaaaataaccaacagagctttcagaaaaatgaactctgacacaatcctggaatcagtccgtgataaagaaaggaaaaccaccttgcatcaaaaatctaaatgtgcttagaagcgagagtatggctctagcatacaggtgaacccagggagagtcagcgacagcggtctttctagaatttttaaaaaggccttcagagaagcaacctagctgaaatgaggaagcagggcacttgtctctaagctacatttgcagagccagctcactctccttccttggattgtgggtttacttggggtggctgagatggcggctaaaggacatgccacagttaactaccctagtgcaactttcagaagactctgggaaatcatactgctactgcgtgcaatgtgaccagcccttcttgaaagccagctttgctctatgcagctttaaaagaaatgggaacaaatgggaaaacttttgaaaagaacagacacttaagtactgagcaagtccaaatgtcgagacttacacaagcaataaagcaaaactcaatgtctgttttcttccttacatgttgcaggacattatttgtgaaggtctttataggcctgtgtgatagaatacattgtacaaaagaccagagcatcactgtacatctagtacaaatgctagacgacttcaaaactacagtaacgtgtcccatcataaaacaaaattttgtcttaatattttccttttacatcttaagtgtatggtgtcttcagctagcctgacatggaaaagccaaaagtaatcactcagggtcctttaaaatactgtacttcaagcctgtcttaaaaacaaaccaaaagcaggagcagcaaagtctagatccttctataatttaagtagagtcctcattgtttaaaaatcacaaaacagactttcagccagtgggagtggggagccgtgagtcagcacagttgtatctggagagaacctttcctacaagtcttgtttgaacagaaagacagctctagtcaaatcttggatatgtgacgcgattctcacaacaaaggaactttgcttctaacaggcgctagttttgcatttcatctgtggaataactagctcctggaaaatacttgccttggtaggtaccataaaggtagcaaggaaaaaatgctgtgacaacatttccttttgattcagcccagtagccatggaaactatcttttaaaggccgattggttctcttccctgcaaaccatataaaataaaactatttcttaccctcctggattcgatggttggaagcatcattttttcaacacgttcaactaacctaagccctctccagcttcagcacaggtctttgcaagctgaagctgtcatatttgattgatactgtggatttaaattagaaaacccatgaaggcattgctaaataaggatgcaaggagtcataacgcccaaacaacgggaagtaaacatttattaaaactgcctgatatgctccaagaaagacaacattggcttctctgtatttccctctttctcctcatccctgcaaaaacacatgtcaactccatcaccttaatgccatcagcccatgtgttttcttctttgtggctgcacaaacaccacgggtgacaagcagcaatttagggtcaagagtttcttgctatttaagatttttctctctgtggatcctttcgtagggaaatggtagctaggctaaaaaaaaagtaagtctatagcctgactcttttttttacatggatttcaatctattgctttcagaatggaattctctccagagatatagctctagatgttattcacttttgaaatttttgagctttaccattttgtatccttaactacagttaaatttgtttcgtgttgtataatttgataaagatggattgcccttgtgttcgttttcctactccaaataccatcttgcctcatcatttaacgtctttttccctccttcggaccctctcaaaatctttctccatgtaagatcttcttttatcggcaatctccaattttgaaattcacagaatcaaaagagaaaaaactgttatcttccagcacgcataaatttttctcactttgtaccatccagtatcatctttgtctttaacctcaaaccaacctaataaaatttattgacagcccattaatttataaaattttatgcacggttagcatgacacttaaaaaattaaaggctacgataccaaatacaatcataaagaacaacaacaaagctgaaggacttacactactatctattaagaactatcataaagatgcaggattaagactgtgtgcttgaagcaagaataaacaagtggactcatgaaacaaaatggaaagtccagaagtagacccacatatagacagtcacttgacatacgacaaactggacaacagaaaacacagtcttctcagtaactgattctaggtcaattctatatctacagggaaaaaaaattactcttgatctttagtttgtaccataatccaaaatcaactcctgagggactacaaatataaaaacaaaagacgaaataagaaagcatctatacaaaaacataagaacagatatcttcacgactttggaatgagcaaagatttttttaaagagggcacagcaagtactaagcataaaaggagaaaaccgatacattagaccttattaatattaagaacttcgcttcctcaaaattcaagaaagcaaacaggtaagccacagactgggaaaatatatttacaaaacctatatccaattaaggaaaccctggtggtgtagtggttaagtgtcacagctactaaccaaaaggtcagcagttcgaatccaccaggagctccttggaaactctatggggcagttctactctgttctatagggtcactatgagtcagactcgacttgacggcaacagtttggctttagttttatatccagttcggagccctggtggtgtagtggttgaactatggctgcaaaccaaaatgtcagcagttctaatccaccttgtaaactctatgatgcacttctattctgtcctatggggtggctatgagtcggaatcaacttgatggcaacgggtttggtttttttttatttatacccaacgaataacaaaaagaaataacccaacagaaatatatgaaaatacttatgcaggcaattcacaaaagaagatatctaaatggaaaataagcatgtgaaatggtgcttgacttcatcagttgtcaaaaaaaaaaaaaaaagcaaataaagccataatgcaataccactactacccaccagagtggctaagatgaaaacagagagaaaatgtgaagtcttagcaaagacatggagaatacactgctggtggtagtgtaaattggtacatctttggtacaaatttagaaaactgctgacagtatctactaaagctaaacatatgtacacccaagttctaacaattccatttctaggaatgtaaccattagaaatatgtttaaaaaaatgccccccaggacatgaaaagagagtggagggagggagcaggctgtctcactggggggagagcaattgggagtatgtagtggggtgtatgtgggtttttgtgtgagagactgaactgatctttaaactttcacttaaagcacaaaaaaaaaaaatttttaatgccccccaaagatacatacaagactgttcatagcagcagtccctgagtggcacaaatggtttgcctaaaggtttggtaattcgaacccccccagtggcactgtgggggaaaggcctggtgatctgcttcagtaaatattacagccaaataaatcttaggagttgtcccactttgtaacacttggttcatagcagcactcttcattaaagccccaagccaggaaagatccaaatgtcgatcaagagtcaactggagcaataaattttggcttcttcaaatgatgaaatactacacagtaatgagaatgaacaatttacaactactcacaacaatacagataaataccacaaatacacattgggtaaaagaagccagaaaagccgaaatggtagatattgtatgattccattcatataaagtacaaatatgggaagaaccaatacataataaaagaaatcaggacagtattcactcttgggaggcagtgactgaaatggggcacaaggaagattctgggattcttattcttgatctgggtactggttaaccaaaaaaactaaatccattgccattgagttgactgagttgatggcaaccccatgtgttacagagtacaattgctccatagggtcttcttggctgtaatctttacagaagcagattgccaggcctttcttccatgacaccactgggtggtatccaacctacaacctgctggttatatgggtgttcttatttgtaaataatcagtgcactaacatttttgatttgtgcactcttcagggtatgttacacttcaataaaaagtttcaaaaaaattagaggcacagtccctatttccaaagaacatcaacagaattttaacatcagagcacatagaggagaatcgtgagaatgtcaacaggtaatacattacaattagttccaaccagctccgattcagcaaatgcctgtgcttatgtccaatgttttaggagtagtggaaaaatctataaagatagaaaaaaattgttcagctctccaaaaaggtatgactcagagaaaaaaaggaaccaagatttaattttataaaaagaaaaaaaaaattagtgataccagacactcaatgattttaagtgctggggtagacagctatcatacgttccaacagctgcgatgtagaaattgagaaacaatgacagctgagggcggggattatcaagaaagatgtgagcatggagtggatggaagcataccatctgaattcacggtcggaggagacagcaacaagaagaattccagggaggggtctgcctggaggaatggtaaaaagactaagcttcctcggtgaggcaggtaaagaagagccactgggcaaaaaaacagtgaagaccaaactgtcttctaatggaaaagaaaaaactcattgcccatcctcagacagaataatgacatgaaaaaagcttgcttaaaaatatttattcattggagaacttttattaaaattatctggaacaattgtttttcaaacattgcaacagtcaggaataaaatcattttagtttgatgcaaccaaatttgacctctttaaagtgttaaaaagtaaagacgtcaccttgaaggctaaggtatgcctgacacaagccatgtctcttggccatctagtgctgctataacagaaataccacaagtagatggatttaacgaagagaaatttatttcttcacagtgaagtatgctcactcactcactgccgtcgagtcgattctgactcatagcgactctataggacacggtagaactgccccatagagtttccaaggaacgcctggcagattcaaactgccgacctcttggttagcagccgtagtacttaaccactacgccaccagagtacccaaagtatcctgaaagtccaaattcagtgtgtcagctcccggggaaggctttctctgtcagccttctcatagatcttcccccagactaggagcttctctgtgcaggaaccttgggtccaaaggaggcactctactcccagtactgccttcttgctggtatgaggtccccttcttttatatctcaagagattgcctcaagacacaatccagtcttgtagattgagccctgccttactaacacaactgccgcccatctccctcattaacgtcatagaggcatgatttacaacatacaggaaaatgacacaacgctgggaatcatggcccagccaatttgatacacgggtttttggtgggacacaattcaatctatgacactccaatgtcttcaatcgcctcatatgcatgtgaaagctggacggtgaataaggaagaccgaagaaggactgatgcctttgaattgtggtgttggggaggaatattgaatacatcacggactgccaaaagaacaaacaaatctgtcttggaagaagtaaagccagaatgttccttagaagtaaggatggtgagactgcgtctcacatattttgcacgtgttatcaggagggatcagtccctggagaagaacatcatgcttagtagagtagaggatcagcaaaaaagaggaaggccctcaataagatggattaacacagaggctgcaacaatgggctcaagcataacaacaattgtgaggatggcaaagcaccaggcagtgtttcattctgttgtacacagggttgctatgagtccgaagcgactcaacagcacccaacaacaacagtgtcacggtgcacagcacagatatttaacaggaatatacacatcacaactaggaattaagaacagttacaatcttcaatagttcttttttttattttattttgtttttcttgagaatatacacaacaaaacatacaccaattcaactgtttctataggtacaattcagtgacgctgattacattcttccagttgtgcaaccattccctcgctctttttctgagttgttcctcccccattaatgcaagctcactgttccctaaggctcctaccttatcttttgagttgctgtcgatagttcttaaaaaagcataatgctcaaggcagatttttttttttactagttaagctaaacaattgtttggctttaagatgtcaggggatattttcggtttttaaattttaaagatcatctgagggcaataatttcaggggttcaccaagcccccatggctccagaaagtctagagtccatgaatatttgacattctcttctgcatttttctctttttgatcagagttcttccataaaatctttgatcaaaatgtgcagtaatgttggctgggtagcatccagttcttctggtttagtctaatggcaaaggagacacacattctatatcctccttctattcctgactctccttctacctctgttgctccaggtaaatagagaccaactgtcatgccttggatggccacttgcaagcttttaagaccccaggcacttaaacaaactaggaggtagaacagaagcacagttacctgggatgtcccatgaaaccatgaccctaaacctccaaaccaaggtttttggatgtacataagcagccccagcagctactattttgttgttgtaaatgtatctcactcaagttttgccagttcaagtattcataggtgtataattacacctgcaattactatcaccagctgtacagccccacccttaattactgcaacttttccatcacctttaaccctgcttcccctcctgcccatccattcacccctggtaaccacaaataaactttggtctctatacagtcgccttttcttttcaagaccaattggatgagtgaggtgagacctagtgggggaaactgagaaatacacgcaatgaccagatcgtcaagctttccttcatttcactttgtgatataccatacataataacagtaagcactgtttcatgtgacatatatttatatgtatacgttgtttttcatgacacatatttatatgtatgtatgtactgggctgaaatataaaatgtgtttcttacgtggctgcagtcaaaagtttgaaaaacactcttctagaaggcttttatggagtccctaatgtgtgcaaacgattaaaatgcttgtctgctaaccaaatggttgatggttcgagtccacccagaggtgcctcaaagaaaggcctggcaatctacttctgaaaaaccagccactgaaaaccctagggagcaaagttctactatgatacacagtcaccataaatcagagtctaccagcctgtaagtggctcttcgaagtcttctgtagaattcacctgaacttggaaaagcttgagtccatgccaaagaactgtaagtggtgacaaaatgcagaataactgagtcagcagtcaggtggggttaagagtctagattaaggcaatatcaaaccctccactgtttgtgcttaaacctcaggactatttactccttcctggatgccctgtttcccaggggatccttaactggcattcctttcaatgatatcaaacgaagcttgaatctaaccatcacctagattcaattctttccacttaatttatctagcaaattttgaaactttgcaaatggaatcactatactgcacacactatttaaagttacattaattagtttgtattttaaaactgttgtttcatttgaaacacctgatatatatagtcctcaaaatggggcacagaaggttcagtagtagaaatctcagcttccgtgccgagtctgggttcaattcctggccagtgcacctcataagcagccaccacctgtctgtggaggttgtgtgttgccatcatgctgaacaactttcagtggagcttctggacgaagaccagggggaaaggcctgacgatttactccaaaaaccagccaatgaaaaccctgtggaccgcaatggtctgatccaaaatcgaatcgtggagatggcgccattgtgcataggggtcatcaaaagtcaagggccaactctgacagctgctaacaacagcagccacaatagcctatgggctaagaggggtcaaatgacaggcaattgggggcaggactgttcattgtcttctctttaaattatcttgatagttgtcagattttccacatcattcactatacacatctagcttcagtgagccgaatggctgctctatgatagtctcacgaatgatactgctataaaaactgtgattaatattaaaaaatgatttttcacatacagcgattttactattaatttttttacccctttaaattttgcagcattcaattaaaatcaaatgaagttttcccaaccccttccaattttgcagcattaaattaaagtctcataagcaaactctcccaaacccccacctccatcactttaaattaaaaattcactaagaacccaaggtctttgctggtgaaagcattccaatcagccacacaaagcattaattgtgggatattatccatgaatagttaaagacccacttagctatatgaggaactgttttccttatagaaaagtaatctgaaagcagagaaggccctcattcattctgaaaccagcaacctggaagcaggcaggcagaagataactcaagtgtacattcatttcctcttctgcggaggtctgcctttccccaaattccatggttttatgatttttttctcttcacatcctattttctgctgcagctacttgaagtcatgttgcacaagccagaattactctaagtactttcaaatacgttactatattaggaaaagggaactgcaaagtttaaagtcgtgtcagcgtgggtgggttttctgccaatgaggtcacgtgtcaataacttactaattgactgaacacactacttatgaagtgttcaaggcagtttaggaaattatcccaaaaagctgcatggatattctggataaactactcttttactgttatggaagaaaatgggctgggagctaaacaaggaacatgatcatgaacttgtgaaccggctgttgttcttgtatcagccagtggatttcatcatatctattttgagaagatggtggaattataatgctacagtgaccaaccatgattagttgatctgtactgtctttgtctaggatcatctattcctaaatctaaggagtcctggtggtgcaatgtttaagtgctcagctgctaatcaaaaggttggcagttggaacccacccagctgctccatgtgagacagtcctgatgatctgctcttgtaaagattacagcccagaaaactctacgaggcagttcaactttgtcacgtggggtcactataagtcgaaatagacttgaggcacctaataacaacatccacccacctccaagggcaaaacatgctctttgccatttgctacttaagagtttctttttacccatttcattctcaacaaaaccacccagggctctatcaaaccaaagacaactagctgtttttggacaaagatggtgggcatgtagccccacctttccctctcatacgcttccctactgaatgggacattggacagtggaacacaggtgaaaacctcagcgaggacctctgaggcttggggtacacaggaaaaaggaaggatgggagaccaggatccgtttccaattcaaattctgatccatcatgccatgcatccttggtcaactcacttgaacctctcaggctcagtttccaaattggtaaaatgtgggagacaaggctagataatgtggaatatcattccagctacaggtttacagtgaagttcttgactgaggctgacacagccagaaccgacttctatccttaactgttccactttgttactccaccaggtcaacagacccaacccagggccttggaaaagtctatttgttccttcctaaattccagtttacaacttcttagttcagaaggaaataatgctctcctcactcactgattttgattggcagcatcctcagatgtttcacatttatcttatattctctatttttttttttttattccccagcaaagatactcaagagtcttcaggtagatgcctctaaattcatttgctctagactagagatgtcccttcagtcatctctccacccctacctgcccagaacctttatcacacaccctgataccttcacgtccccatttaggttgttgtagtaggcaaaataacagcccccaaagatgtccatggcctatgcccaggaactagggaacatgttatagttatatggcaaaaggaagcaaaaggaactttaagatgtgattaaatttaggatcatgagatagggagcttattctggattacttcggtaggcccaatgtaatcacaaagattcttattaaagggaggcaggaaaatcagaatcagagaaggagatatgataatggaaggagaagctggagtgacaccattgctggacagggaccactagtcaaggaatgcagacagcctctaaaaggtggaaaacgcaagaaacagaatgtcccatagagcctctagaaggaatacagccctggcaatgccttgattttagacctttgaaatgtattttttttttttttctggcctccagaactgtcatatattgctgtaagccattaagtttatggtaatttgttatagcatcagtagggtgctaatacagtaaaaaaaaaaaaaaaaaaaaaatacagtagttattattaaatttcgaatcccccaaattaaaataaaatcactctcccatccttccacatcctccaccccaccagctcccactgtattcccctcatgcattttccctgttggccattcaaagctctacaaaaaccaacatatccagagcttttacattcacaccttcagcttaaaagaatctacctcaatacaggtattcactgggaatacacagaataaaggaaaaaattatatcaccaaatctgcaaatgcagccgttaggcaaaggccagaaaacggacagatgaagggtcagtgagtgtggcctgagagagagagccttcttaagtgctgcaccccagggacctcttcttaccctcacctaggtcttggttctcctgttgcccctcctcactccatgttttagaaagtacaacattttttaatgactccaaagtggggagatacattctgggcaacttcagcctggccatggatcttccaaggatttccagatgcattcacgttccatggtaccccgccctaggccggacattgactgggaatgaccacggccagtcagtggggctaaatggttgaccagagcaaagtagctgcaatcagaggctcttgtagacacttctgtgcaggagatccttctggaatcactcaaatcagcctctagccttgctatggagctgcactccgtctggcagtcaataagccctcccctcagcaatgggtccacatctattactgtgctcctgactctttgggggcaatgccaccagggatcctttaaccagacaatgcaccctgctagccagagccgccataaaaagggcttcttggcctaaatctcttattggggcttttagtcccagagcaacctaacccgttataaagtgggttaggttccattttttatgacttgtctggccatcattatgtccagactctcctgtctctaacttaggtgcactctggctcacaccatctctccatttcataaaaactcctgtgggaggcagggtaatagcccttcaaaaatgaccacatcctagtccctgaaatctgtgaaaatatcacacggcaaaagggactttgcaggtgtgattcagttaaagctcttaagatacagagagtctcctggattataggtgggcccaatataatcacatgggtccttgtaaaagggaggtatgagggtcagagacagagaaggagatgtgacaacagaagcaaaggtgagagtgatgtgcagccaggagtcaaggaacatgggcagcctctagaaggtggaaaaggcaaagaaaaaaggttttcttctagagcatccaaaggaacacagccctactaccacactgattttagaaccataaaacccatttcagacttctaatcttgagaactgtaagataacaaatgtatgttgtcataagccactacatttgtggttacttgtcacagcagccataggaaactaatacactctctcagactgctctgggggccaccatccccagcctgacctaatcccacccaccttccctcctttttttcccttactcatttccaactaatatttattgagggcttattgtgtgccaggaaaccctggttgcacagtagttaagggttcggctgctaacaaaaaggttggcagttcaaaaccaaaaggcactccttggaaatcctatggggcagttctactctgtcctataggatcactatgagtcagaattgactcgatggcaaagggtttggctttttttttgttttattttttggttattgtgtgccagctctgtgctcggtagtgaagaatgaacagggtagacaaagattgtgaaagttacaatctgacaagaaattccgacctgaaaccaataaccacaaaaatgatgagaggacccagtgaggcatgtgatgctctggggtgcttagtgggagggaggtttgggagggcccaacctagtctgtggaggaagggacaagcgttatggcaacacgtgaaagacaaggaggccttaacaggagaagggagagaggcggccagcagtgtgctttccaagcactgaaagaggatgagtgaaaaatgacgtcagagcagaagacaggcccataaggcacaagtcgcaggccactgcaaagttgtttttgttttgttctgctttgtttctttgttttttacttcaacctaaggggcaagatttaaacaagggagtgacaggtaaccgataataccaagttcctgaggcaacaggaggagcgggcgcaaggaaaaacactgtgttaagtctctgaggttttgatgaaatgtataaaggttccctgagatggtatacttattaatccccagctatgtaataagcccttctcagaaacgattccatctgatcagtgagctggccactgagcagtgacccaaggatatgcaacagcgaaagaaaaggccacagcgaccagatgaaggcacacagccaggtctgcctatgggaggtcaagcccaggctgaatcttgacctggaggatgggcagctggtaagcagaaacaaccgacttcacccaccacccacatcacatttttccctaaggctggaaccctggacgatctcacatttggcatccaccatgggaatgggcatgatgtttcctggactgagttcatggcccaacagccgagatgaacctgggcagagaggaccacataaggcgtgctatgaaaccatgccaaacatgcctccagaatcacagaggagaagccatctgcttctgaggcaggctcttcaggccaaaaactgaggcactttcctcctggggatctctctgcttgatagttccttagtgggaaagaatgaaaattagaaacaaattctctcagatttattgttcttttctttctagcctttaaatcaaatactactagtcacagtcagagcaatgaacaaatatgtgttttgacctagaccctaaaactgttactgaacgcccccaaggacaggtcaggccttgcacgaatgtgttggtcattatcggtggctaggaggcatttaggataggaggcataggagctttaggtgggggaccgcactaaacagcacacagcaaataaaaaataaactaattgccacccagttaattctgactcatgacaaccccgtgtgtgtaaaactgtgttctgtggggttttcaaggctccaatgacacttttcttctgccccattatggacttgggcaaaggaaggcactaagatgcctgatcctcccatttataaaccagaggtttttgaggccaaagtcaggctgctcaaaaaaaaaaaaaaaacaaaagcatccgaaatacaaatctgcttttagaagcagatcgctaggcctttcttccaagaagcctctgggtgggtttgaattgtcaaccttctggttagtagtcaagccctgtgccacccagggatccagcacacgcagaggccaaaaaaagtatacaaaatcattctttaacacaaggccccataccaagctttaacctaaagcagaagttggctaccctgtaagaatttagatgagaagtttagaaaaagcaaatgaatgagtgtagataaagaagcatgaactcctaatatttatttgtaatagtttatccctttttaatagaaatgaagaccaagaatgatacaaatgcatatttctgccccataaatgataaagtacagtttgttgatttgaacagttctccaaaattgaatccttcgactctgaaactatgaagaagtcttctaatgtttggtcttggccataacccacaaaaatattattttaattcttttggggaagaattattttgcagacctttagttcgagagctggagctgcataatctatggggaagggagatacagtgagttaaccatgccctcaatacctgaagcatcattattcagcgaatgatgacattctaatccccacatcgctgattcaacaaacaaaagagcagaagcctgaatttcagatgggagagatgtttattagcaatgaggaaagagttctctcacactaaagcttacctagtaaagctataaaattactttcccaggaggtctctaaaaagcagaaataaatccatctgctaggtcagtcttgacgtaaccatgcctagacgcggtggaagagacgctttctgagcttctggtttcaccacggggttccatttctagtcagagccaagcacatacacaaaaacacaccctcctaacaacatcataattcacggacagccaatcactggctgaagctaggacaccctcaggaccaccagaaactgccaaatcagcccacgagaggtctgagcacagggcatgacttctgtaaaggtcatttttaaactccaatgacacatttcttctgccctgtcatagacttgggcaaaagaaggcacactaagatgtttctagatccttggtggtgatcctcagccatccactttagaaaccagagatttttgaggccagagtcaggctgcccagaagcaccccaaattgaaatagaaaacgcttctcttccatgccagccaaaagtagggtcacaagaggacttctaaagtctaaagcatgaggcttgtaggcttacacgatgctggtagaattcagtccactgtccagaacaacattctaagcagccttttacaaaagcaaaccacaagcctttaccatcctgtctaggcctgtagtgaacctgggtgggcctgaaaacagccacttttgtggaatgtgaggtaaagactttgcaggctgctttttaagccacaggagttcattcacgtcaccagccctcttaaagaatagtaagtcctgtgttcagggtaaagatgccaatctttccaaaggtgcctctctctgaaggggcaaccgtaacagagttcctgatgggaagcctgcaagcaagccctgcttttccactcatttgtgaacaacacaaagtacactgagaatgctcaacgcatttcaaaatataatccatgttctgctctgtgcctgagaatgaagatgccttaagaaatatagggatacagggaaagagaattaatgtgtctagaaaacctactatatgccaggcattctgctgaaatctttacataatttaacactgatgacaagcctatgaagtagttaaggcaagtattattcctccctatttcatggaagagacggtattgtataacccagaaatgaaggatactgaataaagaaattaaatgctggagcccacaaagaaagtgacagaattaggaaacatactaagaacccatgccctctctcctaccctacacttccttgcaacaccttccatgcttagcccctcccccacctctattttatcacatttatccctagaatggaatcgagattggaggcaatgtctcagctgcagaatccctggtttggaaccatggttctgcctttttcaagctatatgttaccagaaaagtcatttaaactcctagtttcagttccttaatctgtgaaatggggatacaggacaaacctgtatgtataatataaaaaaaaaaatataggaaggggaaaatatgtaaaaatgattaaaaattataaattcaaatgtgagatgatcggggctctgaacaggttcattctggttttatcccctgctgagagtttgcatttccaccccagatattcttgttaaactgtaaacagttaaaatgtagattctgattcagtatatctggggtggaaatgcaaattctcagctgggggttgaaccagaatgaaccagtacgaagccctggagatattctcacgaaaccacttaacagtccatgctagacttgcgccaccagctcctctacgtgtgcacctcacagtgaaagacagagccggactcaagcatgttcttcaagagagcaaccacgatgttcagccctccatcaactctggaatggcaacaaagggagaaattcccactgcaaaagtctaggaaaagtttctgtaaaaaatttagacgttgataactgtggtagtttgtcttcaaagatggcccccactgaaccacacctcctagtattcaggcccttgtatacttccctttctcactcagatgggctgggcctgtgacttgctataacctatagaatgtggcagaagtaacactgtgccagttccaggactaagtcttaagaaggtttagaagcttccacttttgccctgagccaccatgtaagatgtcctgctggggagatcatatagagaaatcacatggagagagatacacactcaaatttaccagtgtccctgctgagcccagcaacccagccattctcaccaaagcaccagacatataagtgagtcatcttggattaggcccagctgatgaaagctctagtcaacaagatgaggtacagaggagccagccaactgagcccaatcagctcacagaacagtgaggagtagtacaacggtagctgttttaaaccctaacttttgggatttcttactgtggagtaatagataatgatcaaaatgaggaggaggagaaggagggggaaagctatatgcctcacccttcacatacattctctagttaaatttccactataatactataaggtggacattaggacactgttttacaaatgaggcctggtgagattaaataagctccccaagtcaggttgagatagacctgaaacccagctgtgactgcaaagcccattttctcgataattgtgttacacttttcccagaatatatcacacaattactggtctctgataaagaccaatcattagagaattgggttaaacaaaacaaaataaaaactatcaccaattaactaatttaatgcatttcaaacaatataaatggaaacaacatgtgacagcgaagggagctttcaactagaagcttggaaacttgagttctagtagtgtccaaatcgccagctgtgattttgcatgaaattggacaagcaatttagctgccaaaaaagttctctttcacaaaaaactaaaataatacagtgttctttttagatttgcagtgttgttgtgggctcaaactgaaatattaggtataaagggcttttgcaaacaaaaaactacacatatacgaagaattcttactaaatcgaggttttaccactttatagttattacagactttctcagttctaaactatttgtattttcctgtctttttccaggataaatgttcatataaattctgttttgagacacgtcacttttttaaaaaatgggaaatataataaacacaaagaccactatttcacgcataacttctttatcaatattgtttaaggccaagccatgaaaagcaaaaacccttggcttatagagaacgaatatatgtccacacacacatatatgtatgttagtatcatatacacatcgtatttttggcaaataacacactcacgtaaataatgcacacacacataaaacacgcatagtgtgcctgggaaaataatgtgcgagggggttgtgtggtttccaaaaaatttataatgtgtgcgttatttgtgtaaaagtacaatacatatatgtctttttttctccattccattggtcccctaatttatgtcacttctgttccaggaaaaaaggtacgcacaatggctttaggggatgtatgtcaataaaaattcagagtcctggcacaggcagagaggcctcctggtgctagcggataccaagaatgaggtataaaatacataatggctacgtagactgtctggcaagaagtaaatatatgaagttatttgttcttttaaatggaatgagatataggaattctcatgaagagaaactctgtgatcctttggtgagcagtggcacctaagagtattaaaacagtcctctgaagctattactcagtatctttttaaaccaaggaaaccctggtggcgcagtggttaattgctacagctgcaaaccaaagggtcagcagttcaaatcctccaggcgttccttggaaactcctcagaattgacttgaaggcactgggttttaaaccaaaccaaaaaacccattgccatcaagttgattccaattcacagtgaccctataggatagaatagaactgccccacagagtttccaaggagcggctggtggatttgaactgccgaccttttggttagcagccaagctcttaaccactgtgccacaagtgtccttttggcagcttttattctgttctggaaaccaaattacatcactggaagtctcatcaatttatctaatagtctctcattggaagtaaaatctagaatcagagtaagataatatgtttataaagttcatatgattaaaaataaacattttattaataaaaaattatatgccaacttttgagtttaaaatgacacatagtaaggaacacgcattctctaagagactgaaaatgattctctttcaaaggccgtgcagcatatgaaaatacattttctagtatatgaatttgctaaatattgtggcttctattttaaagtggaacaatggctaaactaaaaataaattatctgcttaatgtcatcataaaatattttaagtaaaccaaggctagagttggaaatatgacctcatctatgtggttttgactacgtgactgagtttctggctaatgacactattctctgtacaatataatacgtataatatatgcgtgtgcttataattatgtgacaatattctcatttattcattgaattaaaaggatccttacctaaaaaaaaaaaaatttttttttttttttacctagtcttcttaagccttatcacttactattatatagaataggagccatgagtaggcaccgaaatgaaactctccattaagtttaagaaccccatgtgggtaaaactgtacccccaaaatagcaactactatggagtcattacaactgatttggcatgtctttgctccagctttcctaaatgctgttaaaactgtttcattattaagaatatgaatagtatactgtttgtttatgcttatttttattaaataacattcatgagactaaaaacccctctcaaaactacatgtgtaaagcagggttaagtccccaggtggtgcaaacacttaaacactcgactactgactgacacgttggtgattctaacctacccagaggcaccctgggagacaggcctggcactctgcttctgaaaggtcgcggtcctgaaaaccctacggagcgatgttctactctgcacacacagggctgccatgagtcaaaaccgactcagtggcaaccgacaataacaatacactcaaaccatgttcaatctatggtctaaaaatacaaagataaatgtaaaatatcttgaatgtattgtaatcagctaattagaaaatgaatggggacacatgaaccagttaagctatatcatcttacattcattggttaacatcctgcaattactgcaatgaaagaaaaacacattttgtagcttaaaataaagcaaaggctcttgtttaaatctagcacactgttgctgttttgtgccatggagtgatataactcataacgacccatgtgctccagagtataactactccatagggttttcttggctgtaatctttatggaagcagatcaccaggccttttcgtccctgatgctgctgcacgggttcgaactgccaacgttttggttaccaactgagtgtaaaacacaacccaaccagggacctcctagtgcactaaaccaaaccaaacccgttgccattgagtcaattctgactcatagagaccctgtaggacagagtagaactgccccatagggcttccaaggagtgcctggtggattcgaactgccaacattttggttactgaccgagctcttaaccactgtgccaccagggctctcctagcacactagaggccacttactgataactgtgccctgatagatacctccttctaagctgtgccttttctctctgttgccctcatcctccatgccatctctcttagattcatgtgtgcgagaaaggccatttaatcctagtcactaagagtcaaatactagttataaccagacaactgggctggacacatcaaacggccccatcgtcatcctccacagccatcggtctgtaacacttatgaacctcacacaattactattcacaaaagaaaaggagagaatttgcagttacatggctaacttaaccaacctcaacagccaagtgaagaatattcaggcatcaacatgaattccttcagcctgtaggggtcaatgcaatcaaggacattggcttgtctacacagtacatgttaatttaacaataagacaccaatgggcagagatctgtcaggctagaagcacactgaaacacaactcggggctttgaaggccatgtgaaatacaaataagcaatataactggaggataaaaaggatttgaacattataacaggctcagcaactaatccaaagattgggaggttcaagtccaccctgcagcacctcagaaaaaaggcctggcaatatacttctgaaaaatcaaccactgaaaaccctatggagcacagctctactctgacacacatggggttgccatgagtcagaagcaacttgatggttaactgcatttttttttttttttggacaccttctggaattccaaaagacgaaataatcagaaatagtcacactaaagaccacaacttctttgaatcattcgtaagctgccaaataagtgaatagtgttgtaataggtataggaatggaaagaagtaaatatagacaataaatgacttattaattaagcagctaaatacacttatattcataaacatgtaagaaacctgggaactttatgattgctttaactacttattgtgatgaacgattctgaaggaaaaaaaaacagtaagctttttcattttacactactgctgtattctgctgcacattatggaaaggagtgttgaggaacacttcccaaattacagaaggagaaaaatcattattctgtgtaacaggcaactgaaagccagatgcataactacgtgcacaagagatgaagcagaatatgaagaccgtgaacgaacctattggcctgttcttggacacccaacaaataatgggacccaacactgggtgttgtaatctttgcatctctagggaagaaaaaacccaagagagccagtggcaacatgtgtgtgtccaccacactgtgcccactgtcattttggataaagctgctcatgttgcagagaagtggctaaggtgcactctagctaaaggccagatttccaatagcagggcagagtcttttctgcgatgcagacactccctaggcatatacaggccgcctccccgtgcaggaggttctcacgaccacaaagggcaacttaggacactatttcacctgacatgttgcttgaaatagctgggctgtactttaatagctgggctgtactttaagagcattttattgaaaaaagcatttagatcgtagagcatcccctccccactccagaaaaagacatgcgcctgaaaagacacctccgtttcattgggtttggagtacatctggggtacttcactgcttctgactgtcatttagcatatacagaagtccagaaatctatagagtttgctacatggagactcctaatgcaaaagtatctcaaaagtttggagccattcttcatgcttccatcttggaactcttcttctcctagtccatcacaaaaaaataaggattcttgttctctgataattcatgaactctgcctttccttcccattctcatgctaccctcccaaagccagagtctcctaacttttggtgtccccctcttggatctatactatacaccattttcaggttcatgtgcccaacaccagttacctctattccctctggatcaaaaatcatcaatgacttccaatgcatttcctaaaataggctccacaggcaactatcctcccaagttactccatgaaaaattgattcagtgatcaaaaatattttcagaaactcatagagattagtgctatgagttgaattgtgtccccccaaaatgtgtgtcaacttggctagaccatgattcccagcattgtgtgactgtctaccattttgtcatctgatgtgattttccatgtgttgtgggctgtggctgttgtgttataaatcctaacctctacgatgttaatgaggcaggattagaagtagttacattaataaggcaggactcagtctacaacattaggttgtatcttgagtcaacctcttctgacatataaaagagcgaagcaagcagagagacagggggacctcctaccaccaagaaacaagagccgcaaaagagcatgtcccttggacatgggggctctgcactgagaagctcctagaccaggagattgatgacaaggatcttcccccagaccctacagagacagaaattctttccctggagtcggtaccctaaattagcacttctagtctcctagatgtgagagaataaattttcgtttgttaaagccatccacttgtggtatttctgttatagcagcattatagcaatacagattagcatattaaagtctctggaagcttttacagtaatcttttttaactttctctcagcttatctcactttttttcaaacatagagtcttgtttcgactaacatagctacaatacccagcagaactagtgttcctgggaaacaagtctaggtagattctggcccagaggtacagtcccaactgcttagtgtgcattctacggcccatataaacagatcccctatctctctaccttcagttccactcctctcctcccaactgctcatgcccctgtctcagaacatgtgctccaggtgctcctgactagacccctttctctcctcatgtctaagtcccactgaccagggttcagctcatgttcttgttccccatcgagacctatcccaaccacactggccctcattcattactttaccctccaacctcctgttacactgatttttttttttttttttctatttcaccgactcagcactgtttggtgtcttatatgtctgtgtccaatttcttcacctacattgcaagctccttgagggcaatgtattttataactaacttacaactaattacattttattactaattacgatgaagtcgggaagcctaggacaaggtactgtgtggtgaaagtgttgaagaaatgaggtcttttaatgaaaataaggtggatttgtccaagtctgtcagtgtaggaggagaagatggagaccacagaaagacaatatgaaattctctgagtactagtaatttagcagagctggtgaggggtgtctacaaagtgacatcaggatctaaaacgtctacacgatcatcatcagtgttaaaatgtctaatgagaaaccagagatctaaggtcctacacaccaaaccctaaaatgagctgtccagtgaaaaagaggacaaagtctctaattttatctattgtagacacaatgattcaaaggagagaagaacaagaggtgaagcaggactaggttagagcaggactggttgggcctccccccaccctttcccccttttttgcatataggccaggaaaaagataagcagggcagagagtggagtaaacaacctgaccagccccctagagaccagaacaaaatgcacaggcccctgtgagcaagaggtactggctgatgggtagtggaagtgaaatgctgcaaataaactgttaatgtagatctctcacggctccacaggagcagagtctgtgcaaaagaagtaaaagccaccactgcttatcctgccagtgcccgctgaaggggctgatgtgaccaagggaaccagtgcacctgcgtcacatcccataatgagttatgtcaaggggaacccaaggacttccatcttgaagaaattcggtgtgcatacctgcatttgcataacccaaccccttctcagaaaccttcacccttcccccccaaacctcatgaataaacatcaaaagcccttcctccccaccttgttgaaacccttaaatacttggctcttaggcaaatcagtaagatggtctctccaaaggttctagctcttactgtctccttttgctagctgctggcaaaataaatttgcttgtgtgactccaggctgcctcaacagtcctactgggcagcgtggatccagttgggtccaaccgaggaaggggccctcagtgacagacggacagacttctgccctacttggggtatgttaaatctcaaatcagataatttgctaatttctaacacagtaaattcctaagcccccttcctctctcttctcctccatccctaactccctgccttccactcaaaaactgttcattcactacattctgtgcattgaacactgagcaaaaaagaaaactggaaatatctcagggaaaatcaggataaactatgaggtgcagaggaacaaaggtttctactgtctgaaagttctagcaaaatgaaagaaccatttttaaaaatgtattaatgcaccaaggatgagacagcctaaaatccgtcatagctaaagcttgtcaaaagcaggaagtgggcagaactacgcagtgtcaaatttctgtctttcgcttatttgtttcttttcctaatgactttctgttgttaaaatttcaaaattataataacaggcattgtttgtaatcattttcctaaatccagcaccatttcctgacacacagtgggcacctaataacaatgttaagtgaattaatgaatgaacaagagaatgaaagaaggaaggaagggagacattctgctcttgcataaaaatgctgtgtttgttggaaactttttcaaaaagtgttgtaattgctttaaaagagtccctgggcggcacaaatagttaagcgctggattactaactgaaaggtcggtggtctaaagccatccagaggcacctcaaaagataggcccggcaaactgcttctgaaaggtcatagccttgaaaatcctatagagtacagtatgattcaacaaacatggagttgccgtgagtcagaacagagtcaacagcaaccaactacaattcctttagaccagcacacagccaatggttggttgtaaagattaatccatgccttctatggacgcttgagtacatgcttcctttaaaaacattattaaagagtaaattcagatgcacagcaaaatatttagggatctctacgtgatttccctttcatattagagatacgaagatgaagcaccacttcagaattttaaaaagacagttcattccacacaatctcaataggacaaaatgttggagagctgagttaacacatacttctcatctggagaagggagggagaacagcactacaatatagaattttaacaagtttaggtaaaaacaagaagtgagcaagatgaaaaacaaaaaaacaaacccatgccatcaaatcaattccaattcacagcaaccctacaggatagggtagaattgctccattggttttccaaggagcggttggtggatccgaagtgctgacctttcgggtagcagccaaatgcttaccattgcgccaccagtgctcccagtctaggagaagtcaagttgatcccccatttgacatcagttaactgaatgctttgtactatatatgaatataatgccagcaagttatctaatttatcttatttatttggagtctccaggtggtgcaaatggttaacgagatccactgctgaaaaaatgttagagattcaagtccacccagagataccttggaagaaaggcctaaaaatctacttccaaaaaatcagccactgaaaaccctatggagcacagtcctaccctgaaacacatgggcttgtcacgagttggaatctactcagtgttaactggtgatagtggtatttactaaggcacacttaccatttggactgtgtgtgtgtgtgtgtgtgtgtgtgtgtgtgtgtgtaaaactggatatgaattaaagaaaacatctgtatcctaatctcatgtaatataaaaaacaatttggaaaaattattgatgataatttgcaaattatctaatatctaatatttaaattatctaaaaattaatggggagtttgctacacagggactcctaatgcaaaggatctcaaaagtttggaaccattcttaatgcttccagcttgacaactctttttctcctagtcattcacgaaagaataaggattcttgttctctaataattcacaaacttcacctttctttcccattttcacactgccctccagaagccagagtctcctaactgctctgtgtccctctcttggatccacactacacactattttcaggctcaagtgcccaacatcacttaccccttttgtgtctggctcagaaatacgtggcttgagtgctcctatgatgctagaagctatctataatacatactatcttccctgcaggaatttgtgtttaaattgaacaaagaatcaggaaagggaagaaaataaattccttgctggctggtcaacaaagtccaatcttttctcactctcatttccataatgctgcaaacacagcatagtggattaagtgactattaacccaaatacaaccccggtacataccataattaccgaagaagtcatattcaggattcccgaacaattcattcatcaacaaaaaccactcaaggtaggtctgcctacttgataaaagaactctcctttgtataccatagtactttgttagcaacaccactaggacacttaagtttatctgactacatcatatctctactgctgttgtcattcgttgccatcgagctgattccaactcatagtgatcccaagtgcatcagagcagaactgtgctccatagggttttcaacactgtgactgctcagaagcagatccctaggactatcttccgaggcacctctggggtagattcaaatcaccaaccctttggctagtgttcaagagcttaaccatttgcaccattcagaggccccaaatagctctttgatggagaaaacgcttgtctcacagatatcaagactcttgcctttaataagatccagcgatataattagggtacatttctaaaacataccagggctcaataagtgacaggttacttcattattgttattatgcgctctattgttatccaccacctgtttgttgtactgtggtggcttgcatttccctacgatgctagaagttacgccactggtatttcaaatattagcagggttacccataatggacaggtttcaatggagcttccagattaaggcaggctagaaaaaaggcctagtgatatacttcccaaaattaactaatgaaaaccctgtggatcacaaccaaatactgtctgatacagtcctgaaaggtgagtcccctaggttggaagacactcgaaatacacagtggccacaacaatggcctcaagcatatcgatgatagtgaagatggtacaggaccaggcaacattttgttctgctggacatggagctgcaataagtcagagtcaatttcataacaactaacaacaacatgctctctgagatgagtaacaaattcacagggaatgctgacttaatccatcaccacctactttcacgagtctgggctacagcgacacatgcaaactgagagtttaccaggagaaagcaggtggtagcctgtaagatccaggtagcaatcccagctaaaggcagtggccctcaggtagcaatcctggctagaggcagcggccctcaggtagcaatcctggctagaggcagcggccctcaggtagcaatcctggctagaggcagcggccctcaggtagcaatcctggctagaggcagcggccctcaggtagcaatcctagctggaggcagtggccctcaggtagcaaccctggcaggaggcagcggccctcaggtagcaatcctagctagaggcagtggccctcaggtagcaatcctggcacgaggcagcggccctcagcagcaataccagacaacttcactgcagcaagaaatcctcttaatgatcgccatttggttcgctttaaactacaattacagacacccaaaaggattggctaaacgtgaaatggcacagctctgcagagaaagcaagggggcttagagcagagggcttggtctctaaaaatgccccttaacaagaatttactgcatgaatgaataaacaatgggagtctagaccagggagtcatggggaagacagtcaatcctgaacgagggtgacattagccatcagcacagcgcccacaactctcccctacacaactctctcaagccaaatagtaaaatcagagaagtgtgcctacagctgaaatcaaccccacttctttctaaatttcatttgaaaacctcagaggtttggtggaggttaagtgctcagccaccatgtgcaatctaactttccaaatacataaataatatacatacatataacatgtattaaaatatacatacaacataaatatttttattacatatttttcattaacatatccaaatatagagagataagttcagctccacactaaaatgctttcaaaattggaaatgaaaatcatgcccgagaatgccaagtagactaacaggcttgagtgaaccttcttgcaaaaaacctacataccaaaaagttaccacgaagcctcatggtgttaaacgataaaaccaaccaaaccaaacccagtgctgtcgagtcgattccgacttatagtgaccctataggacagagtagaagtgccccacagagcttccaaggagtgcctgacagattcaaactgccgaccctttggttagcagccatagcacttaaccactatgccaccatggtttcctaaacaataaaaagcctcctcttaataccaaaacccaaccaaacccactgccactgagttgattctgactcatagcaaccctacaggacatagtagaactgccccatagggtttcctaggctgtgatctttatggaagcagattgccacatctttctcctgtgggctccaagcaccaactttttgcttagcggctgagtgcttaaccactgtgccaccatggctccctcctaataacaagctcttctttatgattaccaacctggcttctctgttatctagtcatactgacagccagtccctggccataatcacctgcctatgtatactagtttgcttgtacaactttttgaataaaacttttcaaaatgataaacaaaaaaattagcatatctaaccccaaccaaaatttctaacaattgtctagcattatagaaaccatttggggagggcactcatgaaagatacccacagctgagaagtcagggaagggctgacctccacaatgaaggggatgagaaaaggaacaaatctacttgaaggccttctgcatacccttcctacaaaaacgattaaaaagagaaactgccgtttatccacatactgtgttcccggttttcaaagtaatgggtaaaaattgtcttccttatagttcaggcaaggcacacaaacacatttcttcagctctaagtacaaaaaattgcttcatttctcaagtaaatatatactaggaacttgtggatatctccagagcgccttggagctaaagaaagtaacatcgttgcctactcattctgcttcatttgctagtctcccagaaactccgagctagctattcatcccttagatcccagaataaagcagcagtccagagctctggaaactccccacctcccgcagccagctgctgactgggccacgaggtggtgggatggcgtttcttcccaggatgccttcttggtaatgcacacatcgcatacatttcagctatcttctccaagcttcattctggtgattaagcttcataagcttctcccgaattgtttattctgtgtttcaaagccccatcagctgttgtgatgatttgcgagattttctttttctttttggttaagcgggattggtgagtattactgggacttttggtggaatctctactatttaaaattcctactgctgggattaaaggagataatgcctgtgaaagcctttcgtaaactgtaaagtcctagtaaaatgtagtgtgctataataatattaagcattataacaataaccacaatctggctgcaatgtgggttttaaaacgttgacatccatttggttcttctctttgttccattcccatcccagggcctagattggtgcctgatgagaaagttttgtttggatgaataaatgattcagtgaacataattagtgtcactgaattatacaggcaaattttttcacatgtatatatatacatactcatagcgaccctacaggacagagtagaactgccccatagagtttccaagtgcctggtggatctgaactactgaccttttcgttagcactacgccaccagggttttggaatcaactcaacggcaatgggtttggtttatatatgtatgtgtatgtgtatacctatacacacacacatatatatttgtcttttagttattgaatatatatataaaacatttaccatttcaacatttttacatgtataatccagtgacacattctttaaatcatttacttatccatatatatatttattcacatatacatatttattcatgtctaccatataatgtatcccaataaaagaaatagaacaaagttttaaaaaagacagccaaaacactgggacggcagtggtagctcaatggtaaattcccacctccatgcaggaggccgtggctgcattccctgccagtgcacagccaccagctgcctgtctgtgaaggcttaccatgcagctaggatgccaaacagggttcggtggagttccaaactaagagagactagggagaaggacatagagatctacttccaaaaatcagccagtaaacaccttatggatcatgacagtctgatctgcaaccaatcatggggatgacacaacattggggagcatttttgttgcattgttgatggggtcaccatgagttggggacttactgcatgacagctaactcactgcatgacagctaacagcatgaacgggagaaaatatttgggaaccatgtataagggtttactacccagaatatgtaaagaatgtctacaattcaacaacaaaaggacaaataacccaattaaaaaacactcaaaggacttaaataaacatttctacaaaaaagatatgcaacaatatccaaaatatatagaaaagttctacaacttaacaataagacaaacaacccaatcaaaaaataggcaaagaactggaacagatgtgtcattagataggatatttgaatcgccaacaagcacataaaaagagaatcaatatcattagtcattggacagatgcaaattcaaactataatgagatactacctcatccctattagaatggcaatgatcaaaaaaaatggaaaacagcaggtgttggtaaggttggagaaactgggatgctcatccattgctggtggggatggaagacggtagttcaatgttcaactttttgagggaacaccaaactgttttccacagtggctgcaccatttttcatcccaccagctacagccactgtggaaaaccatttgggattttttcaaaaagttgaacattgaacgaccatatgacccagcaatcgcagtcctaaatatatacccagaaggagtgaaggcaggaactcaaacagaaacctgtacaccaatgttcactgcagcacttccacagtgtttgcagtgttcattgcagccaaaagatgaacggataaacaaaatgtggtgcatacatacaatggaatattattcagccataaagagaaacgaagtcctcatacatgcaatgacatcgatgaaccttgaaagcattgtgctaagtgaaataagtcacatacaaaaggacaaatattctatgaccccacttatattaagtatctagaacaggtaaatgcagggacaaaagtttagtagtggttaccaggatctggggggagagggaatgggagttataactggagcgatgctgagtttctgtttggggtgaagtaaaacttttggaaatggatagtggtagtagtaccacaacaaggtgaaggaaattcacgtcacttaattgtatacttaaaagacaagctccttgttatatatattgtaccacgataaaattttttaaaatgcaaaaaaattatatagttttccaaattaatacccacaggcaaaaaataagctaaacatgacaatttagacaacgacgatactctgcccaaaatattggggtactaagaaggaaacactgcagaacaagcccttcttctaaagataattttttgataacgcaatccggccttttacagtcagtatgaaaggtgttcagatcggagaaggcatttatattagtccagagaatttctatcagtccaggataatggcttggaagaggaggctgccaccccagaaatgcagttagagagagttaaaatgacaagcacaaaagatgcaagcggtaaccagcactgatcattataccctaagctaaggtttattgcctggaccttgactttctagggatggaaatggccaactttttgtcagaggaggaagaaggcatgaagagaagttgccaaggaagggtactgctataaattacttctggaaaatgcttctgtgagtatctgcaggaataattctgggtcattaaaggagtgatgtctgttagggacctatgtgtaggctatgcacaaatacgagagggggtggtaatgaacactgaaaggaaggtggtagcggccaggaccccacagaagcctcaaggatgagaaggaaattctgggactgctgccttttactcagaaggaaagcaagtatctgctttgtatttaagcctaggggacatggatatccaacagctcctttcctctaaggggaggggtgtggtgaggtgagatctacaggagccaggaggctcgcccgccaccagggcggtctgcaggcctcagaggcaggtaggttcagcgcacaggcggccctctctgcttcagaaagtaccgtatttctgcccatcaatcagcgttatgcagcttcgggggctgagccttaggcacggcagttgctagtagcaacaggggcaaactcccagcgagctggggcgagccgctgcagcgagggaggggccgcctgggcgagaggccccagctgggcagacaaggtcagcgactgaggcttggggccgtgggggggggggcagtgctaggtgggagccggcgcgccctgttgaggcctggccgagcagggcctagtccgctggccaccagaggggtgggggcgggttggtatctggtggcacgccaatgctcatgccatgttcagcaacctcctggtccccttggaggcgccgcattctgctggcacctggacacaggagtcaaggccaaggggctggaccagtactagccttgcgcttgggtgggccccagtactcaagacccgcccccttccctgcagcctgtctaagcccccactctacaggagtctcctgaggacgccaacgtggaattgtgtctgcacgtgtgcgtgttttcatttgcgcttccagcgaggccccacaggtggaaaggagtggggagaggcgagcacaaggcggctcagactgccgggggagagggaaaggtggatgcacgcacacacaaactcgactcccaccccctgtcctgtctcctgtccaggcgccttccagagagcggaggctgtaaccttgcgccacctcctcaaacttctccccctgccgtttggatccggtaaggtagaaagagagagcgaccgtgaggaagggcgatagagggcagagatggaccaaggagaccaaggagagaggcggggagctgggagtcctcggggacaagtaggagctcaggagatgagggtccggggaccggtgaggccaggtggccgtgcgcagggggcgcgcctggaagggggagcgggctggtgtctccttacctgatttgcagtggagcattttgcagcaggccgggggggttgtgggaacctccccccaaaaggggcagaccctgcagctgtgctgtcacttcgggggcctcgaggtgctggccgaagagcctggagttaacaaacttgccatgtccgaagcgtgcggcggtgaccccggccccacgcactccgcagccggtggcgcggcagccagggaaccccgcactccctcgcgttcttcggctttgttgtgctgcactgatccccctgcgcctgcctcccggtgtctccgcgccctctcggccccgggacgtttcgcttgcgtttggggaggcccctcgagtccgtcgtgccactttcctcgtaaaggcgcacgttaaagagctgctgcggagcgctcgtctaggctgcgcggcgtgcgctcctccgaggcggctccggcccatagattcccgccccccaccttccccccctccgcctctctagcccccccaccccccaccccttaggagctgcttaggatcggggctgtcaaatccagcccatctgctgcaatcataatcagtctcaaccgaatggttctgacaaatctccgcccggagccagagttggggaggccggagcgtgaggggcggggatgggaggcgggagcaaggggacgactgggacccggcgcccagagagagggcctggaggcttctattgtctgtccctaacggaggaactgaaaggggaagctgggacccagaaggggaaatagtgcttttctttccctattccgtgtaagaaaaatcattccatcccggcagcccctggctccctccacccgcgtcccaaaccacttctctgactgggtagaacgaatttctgttaataaactaaacaaacaggtcccataatcttatcaggttgacccaaagactgggacagatatccgaagtattgtaactggcaggtcagagctggaactaacagccgtttgtcttcagtgagaagttggttcccaagtacgtttggggataaagcttaaggagggaagactagtccgtgattgacgaaaaagctggcccactgcctcctgttgacatttcagagataaaaggaaacccgctttgtgcaagaaaatgtggaaccccgtttagccccattttgactttaaagaattctctttttttcccattttctcctggagatgctattagaaaacagtgacttctaaaattaatatttttctttccaaactaaaacagttccttctgcagaagaaataaggtgctctgattagtgcggagttctaatggaccacaagtaccacagcctccaccagactaagtccagcacaactagacggtgcccggctaccactgactgctctaagggggatcacaacagaggatcccgacggagctggagaaaaatgtagaacaaaattctaactcgcaaaaaaaaaccagacttactggtctgacagagactggagaaacctcaacagtggcctcagacattcttttaagtcagtactgaagtcactcctgagggtcacccttcagctaaagattaaacaggcccataaaacaaacaataatacacatagctcaaccatgtctaagagactaaatggtcacaccagccgaggggcaaggatgagaaggcaggaggggacaggaaagctggacaaatggaaatagggaacccaagatcgagaagagaagagtgctgacacatcacaaggttgccagccaaggtcacaaaacaacatgtgtattaattgtttaatgagaaactaatttgctctgtaaaccttcatctaaagtacaacaaaaagaaagtgctctttccaataagatactttttaactattactgccgcttcaatagaaacacatatatttgtactagtgataggcttacaaggatttcattaaatcagtttacttttcaaaatagtataacaaaaatacagtagccctaaaaaacaaagaaaaacaaacctattgctgtcgagtcaattccaagtcacagcaaccccataggatagagtagaactgccccatagggtttccaaggagcagctggtggattcaaacagccagccttttggttagcagccaaacgcttaaccactgcaccaccagggctccgcataaacaggtcttaaagcatgaaagaatacaaccaatggggttatgcctgatttttcacattcctctcaagtgctgggaactgttccgttaccctgaatgacagtatttgttgaggaaataatttgttgggtaaacaaattaccagttgaaaagttgaaggggggaaattttcaagccatttattcagataggtataagagctaggaaaagatagaccttgctgtgaaaattaaattgagatttaaattagtgttcaaatcattcttttgcattatgcggtacttgagaaatgtgtgcaggccacattaagcacccactgatctaggtagagactgtgtcttctacttattttatagccctgtggtgcttacaacagccctgcacaactatgagagctccgtgaatactgatagattgaagccttgatgtacacctcacgattaaaatcatatgcatcacagtcactctatcagtgaggtcaagtggggtctgagggtcaccccaagtaaataagtcaagcacaactaataacagactttaagacagtttgattagtatttgaaagtttctacttctttgtcaacttgtttaatgtgtttatagataggacttttttttttgttaaaagattaacatggttccaagaaatatctccaaaagggtcctttacaccagaatgaggggtcatgctggtgaccaacctaaatgacagtgtccaagagattggtgttgtcaagggagagaaatattgggctgagtcagacactggactccgggtacctttctgctcaacaagtgtccacattctgccatgttattttcccattctggtagtttattgtcaatagcatcaagttcaagtcttgctcaattgatagtccttcttccagttcatcaagtcattggttttaccttcaaaatatgtctccattacttattgcatgcttactgtgtgttagtactagaatataagagagaaaacagcagacaaaaatctttgtccgtgtgtagcttacattttggaagggaaaacaggcattacaaaagactgataagtaaattatatcctctgttaggtggtaatcagtgctgtggaggaaagtaagcaagtagggttgagtggcatacaaattgggtgcccggtgaaggtctcactgggaatgttaaatctgatcaaatgattaaaagaggcaagggaaacggaataaccagaatggaaatactgagaatgttcacacattgtgaagaatgtaaacaacgtcactgaacaatctgtgtagaaattactgaataggaatttaaactactgtgtaaaccttcaccgaaaacacaataaaatatatttaaaaactaataataaaaaaagaggcgagggaccagagcagctatgtggatatctgggggaaaaagttccctggaagagggaagagcaggtgacatagtccaggaacattaatgaggcaggagggatagaacagactgaggggaaagctgccaagggggtgggcttagaggatagatattaggtgggacctaacagcctaacttaaggactggtttttactcaaagtccctaggtggcacaaaaggtttgtgctcagctactaacctaaaggttggcggttctaacctatgcagtggcaccttggaagaaaggcatggcaatctgtcaccttaaagattacagccaagaaaatcctatagtacaatcatattctgtcaaacatgaatttgccatgagtcaaaattgacttcacagcaataggtttgcgttttcactctgatatgggaggatagagttttgaacacaggcatgacgtgatctgacttttgtttaatggatcactctggctgccaggttgagaattacaggtgacaaaggaggaagcagggagatctgttagtaggctattgcaagaatgcaggtgagagatgatggcttgggcagggcgatagcaagaaagatgctgagaattggaggcaatttgggattgttttgaattaggagccagtagtatttgttcaggacaggtggtttttaagaaaggaagggagtaaagaataattctaagtgtttggatttaagcaactcaatccttccagttgctgttaactgaaatgtgggagactgtggggccctggtggcacagtggtaaagagctcagctgctaaccaaaaagtagttcacatccaccagctgcttcttggaaaccctatggggcagttctactctgtctgtagggtcactatgagttagaatcgacttgacggcaacggatttgattttttggtttatgggtagattaaattttgagggaagaaccaggagttcagttttggatgtgtcaagattgggatgcctattaacttaaaattttaaaataggtaatttatgtaaagtatttggaatagttccagagttactgggtggtacaaagggttaatgagtatggctgtcaactgaaaagttggaagttcaagtgtacccagaggtgcctcagaagaaaggcctggagatctatttttagaaaaatcagccatggaaaatgctgtggggcacacttctactctgacacacatggggccaccatgaatcagcatcaactagacagcaactggtttttggtagactagttcctagagtttggtaagtatcatgcaaatgtctgtggtaatggactttgtattgatggttgttactgttgttattgatgtctgccaaccaaaatagatattgagtagatgggtgaataaatattcaactgtagtgtttagggcacaaggcgggggggtgtacatttaggaattgtatagaacgtagatggttgaagtaaatccataagatcaaataggtcatccgggctgtgagtgtaattcaagacgttcaaggaaattttaaaaagacgagaagatgaagacaaaccagcacaagaggccaactggagcagcagccagtgaaggagaaggcaaatcaggagaatggggcccccagaagcctagtaaagaagatatttcaaggaggaaataatgtgctagtcatattctactgttatgtttgtctccatagaaaacccaaaagaatatacaggaaaattatgagagtttatcaaggttcctggataacataattgcctagcctgcataatacaatatccatggtgtcccagcacctaggtgagagtcaagcacgtggagatattcagtgtgtgctaattaagtaatgaatcaatgaaggaattaaatgccttatgtagcaaagtgtttctcaatttactacccatggatattttcaaaggggtcctctgttttcaggttcaggaaatactgatgtaggacaagatgtctgagagaagatggacctgggaaacattacgtgtttctcttttattaacccttatcaatagacaagagactactaacccacaatcaagttttatatagaccattttctcaggccatgtttagtaaaattcaaattaataacaaagaaataactcatatacatataaaaattcaaaagcatacttttataagatatcttgcaagacaaacaacccaattaaaatgagcacgatatttaaacacacactatcaaggaaaatataaaaatggcaaataagtgcatgaaaagattttcaacatcattagttattggggaaatacaaattaaaatcacaatgagatttactcatatccattagaatcgacaaaattaaaaagattgacagtaccaacccttggcaaggctgtagagaaactgaaattctcatacgttactggtggtacagcaaatttgggaagctaattggcagtttcttttaaatttaaacacacatttaacataccatccagctatcccactcctaggtattgacccaagagaaataaaaaaaatgcccacacaaagatctgtatacaaatgtttatagtagatttattcataatagtaataaacgggaaacccaaatttccatcagcttgtgaatatgtagacagcctgtggtacctccatccatacaatgaaatatactactctgcaataaaaaatacaacttgcatgaatttcaaagtcattatgctaagtgaaaaaatacagtctttttttatatgactagcttttacttgaatctagaacactctagagataaaaaccagatcaatggttgcctggggctgggggtgtcgttgacacctagtgacctactctgacagagtagaactcccccatagggtttcctaggttgtaatctttttttttttttggtaccatgcacatgctcatatagtagttgctgttgttttttttattatatgtcagatgaaggtttacagaacaaactagtttctcatgaaacagtatacatgttgttttatgatgttggtcaacaaccccacgacatgttcacactctcccttctcaaccttgggttccctattaccagctttcctgtcccctcctgccttctagtccttgccctgggctggtgtgaccctttagtctcattttgttttattggcctgtccaatttctggctgaagggtgaacctcaggagtgacttcattactgagctgaaggggtgtctaggggccatactctcagggtttctccagtctctgtcaggccagcaagtctggtcttttttttggagttagaattttgttctacacttttctccagctctgtccgggaccctgtgatccctgtcagagcagtcagtggtggtaaccgggcaccatctagctgtactggacttggtctgttggaggcggtggtagacatggtcctttagtcctttggactaatctttcccttatatctttagttttcttcattcttccttgctctcgaaggggtaagaccagtggagtatcctagatggccattcacaggctcttaagacctcagacactactcaccaaagtggagtgtagaagattttctttataaactacgttttgccaattgagctggatgttccccaagaccatggtccccacagcccaggctgtaatctttatggaagcagattgccaggttttcgttccttggagccactgggtgaattccaatagccaaccttttggttagcagctaagcacctaaccattgtggcaccagggctaggggtaggggcaagatattgactacagagaggcacaaggcaagtttttgccatgaaagaattttttttttaatgtcatgattatggtagtggttatataattgtgtaaattgtcaaactcattgtatgcttaaaaattggtgaattgtatatacattacaaaaaaaaaaacaaacctgttgccatcaagtcaattccaactcatagcgaccctacaggacagagtagaactgccccacagagtttccaaggagcatctggtggattggaactgccaaccttttggttaccagccatagctcttaacccctacaccaccagggtttccgtatatacattataccttaataaaaaaaaagatttttttttttaagaatttaacttgggttttgtttgtttgtttgttttggtagggggattatagtactttcccatttggaaagaggacgcccgccttggaaatatctccattttgtaatccccaatggaaaactgattcaaataaagatcttcaatgaatgctaaagccattaggtaaaaatttgatggaaaacagaatactcgtacagcgtcaagcattacccactgactttttgccacctgcaaaggggaaaagtcatcatatacaagggggagatcataacctggcatgtccctctttatgtggtactattcgaaaaataaactgcatgacctgtgaaataatcatgcaaagaaacatgtttaacctgaatctaaccaaggactttgacataattgtcaggttacagaaaatacggaggacagaggtacagacacagtacatcacacggtaacagaatgtgcagaatgtgggacattctagatctcttttcaaaaaaagtccatctctatggggcagaaatgcagaggcactataataaattaaaagagacataactaaatacaacccatgggactgggtcttggtccaagaaaaacaactataaaagacatttggggaataattagagaagtttaaataaaggctgattttggataatttaagagcatttttattaattttgctacgggtaaaaatggtattgtagttataaaggaaatagtccttatttttaaaagacacatgctgaaggatgtaggattgaggtatcatgctgtttaccacacactccgggaaaaatatatatgaaataaaaacactaccatttgttgctactaaattgtgagttaggtgagtatttactatactggtctctccatttgtccgtatatttgagaatttttaactaaaaatttaaaaaatacacacttctaaaaatgcatgggttgagaattaaagagaattagaaaaatgtaaaacttaatgtcttaaaaataaaactatatatcaaaacttgtaaagatccaattaagcagtacataaaggggaattaataattttagtgcattttcaagaaatgaacatggaaaatgtacaaagcctccaaccaaagcagttagaaaaaatagaattaaaaaatgaataaatcaataggcttaattataaaaaggctacataactcacaatacaatagaattgtaaaaaataataggacatgttcactataaggaggtttgtgggtataaatttgaaaacataggtaaaatgatcaaatgcctaaaataaaaggaacttttaatataactcaagaaccaatagaattttgaataaacagattaaataaatagttgaaaaaaaatgcccctgtattttttttttttataaccaataggcctgtttttttgtcttttttttttttttttgtatctttattgaggtataattcacacaccataaaattcagccatttaaagtatacaacccatgtgtttatgcacaattttgcaaccatcaccataatctaagtttagaacatttttatcatctcccaaaagaaacccttagtatctgtcagcagtcatctcaattccccagccaaaggaaaccactttctactctgtatacatttgcccattctggacattttatataaatgaaatcaagcaaaatgtggccttttgtatctgggttctttcacttagcataatgttttcaaggtttatccatgttatagctggtatcagttctttcttcattcttattgccaaataatattccattgtaggcatacaccacatttatctgttcatcagttaatggacatttgggttgtttccatcccttggctattataagtaatgctgctataatcattcatgtgcaagtttttgtgtgctcatatgttttcacttctcctgggtatatacctagcaatggaattgctggataatacggtaaggattacagccaagaaaaccctgttctctataagtcggaatctacttgacagcaccaacaacaacaacgtggtaactctgtttagcattttcatgaactgccagtttccaaggctacagcaccattttatattccctacagcaatatatgagggtttcaatttctccacgtcctcttcaacacttattatttcctttaattatagccatcctagtgggtgtgaagtggtagagcattgtggttttgatttgcattttcctaatggctaataatttttagcatcttcttcatgtgtttattggacattggtatatctcctgtggagaaatgtctattcgagtcctttgtcctttttctaattggcttatttgcctatttattgttgagtcataggttttgaaggcaaacttgagagcttgaagaaaagtacaaaacccctactaatccttatagaaagagttccagggaatagaaaaaataaaaaaaggaggcggggagaagaaagtaataaaggggagaaaaagaggaagggggaggggagaaggatgagaggaggaacgataacctctatactggattcaaaaattataaagaaaactaaatccatcaagcacactaatagtagcaataataatgtggcatggccataaaaggtttatcttgtaaggcaaaaatgttttggtgctagaaaaatctattaattaaatttcccactttggaagatggaaaaaaagatatcattttaatagataccagaaaacacatttaataaaattcagtgtgttctcacaattttaaaaaacagtagtaaaaatattttacaacctaggattagaagggaacttgcttaacctagtaaaggattatctgctaaaaacctagagcagtcatcatactaagtggtcagatttaagaatactcctttaaagttttgctctaaacaaagatgcttctcttgtcacttccattcaacatattcttcaagttcctacttccagcaataacatatatatatataaaggtataagaattacaaagtaatgaataaaactatcattatttgtagtcaatattgtatctccagataataacaggtaaccgaaaagaacctagggacaaatcatcagatatgttgagagcagcgtgtttactagataacaaaaccaaacccattgccatcgagtcaattccaactcatagcgaccctataggatagagtagaactgtcccatagagtttccaaagagcagctggtggatttgaactgccaaccttttggttagcacccaagctcttaaccgctgcgccaccagggctcctactagataaaagaacaatctaaaggagcaacatagtgtccttaccgaggtgccagaagtaaagtttttagaagattccatttaaaattatatagatatttgctttgctttttttaattttagaaagtaaataggaaatcaagctaatgatgtgaaacacctttataaagaatactctgttagagagcatgaaagaagagctgagtaagtagaaaaacatattatagtgatggattagaagaatcggtctccctacttaatctttaagtgtgaaatattatcatcaaaatcccagcagatttataccctaaacttcactagctggtcctgaaattcttataaaagagaaaaaggccaaaaataacaaaatctacttacgggtgactcctctaagattccaaaaagtatcaggcaccttaacatccagctgggtaattaaacaggtaagtgagacacgtaagtaaactaatagggcagaaagaaagcctagaaatggacccacgctgatgcagaggttgagaaatggtgtatcagtgtagttttaattcgcatttttctaattatgagtgagcgtgaacatttttttacacgtttaaagccactttcatatcattttgtgaattctacacaacttttgtccatatttatattgagtttttgacattttttcctaatttttacagttatttttatattagggaaaatgcaaattaaaactacactgaaataccatttctcatctatcagattagagaaaatttcagaatttgagaactcattctcactggtaaaactggggttaagcagtctcatacatttccggtggatggagccctggtggcgcagtggttaagcggtcagctactaaccgaaaggtcagcggtacaaccccaccatcctctctgtgagagaaagaagtggcaatctgcttcagtaaagattacagccttggaaacccctgggggagttctcctctgtcctacagggttactatgagtcagaatcaactcgacaacaatggggggttttggtttaaaaccattttggaggagaatttggtaatatacaaaaagacaccatttgcatttaccatttcagtgagtattcccacttctgagatgttgttttgaaagtatacctccaacaatacgaaaatacagttactcatcactacattgtttgtaattataaattgttgttgaaactgtctctaacttgtccttgctctccatacatttctgtttttgctttttttttttttatggcttgtcttatctctcaagattggattataaactatcattcaactttgcaatcattgagcagcttctgcactgtttatagatagcagggctgaataaatatttactgatttgaaaattactaggactaaataatcattttgctctaagaaattttatttgagaataaagcactctcacaagttaataccatgtggcttatttttaatttatacccgatttttgtctaatatactttttttttatactttttgtcatggttcttaataagttaagttttatcatagccagtcttaagtaaggaaatttgattatttcaataaatctctgtggctagggcccagggacagctaaattcatcacaacaacttaaagcaagattccactgtatactttttacacttttatagtcacaactagctagaccattattctaggaaaacactgtcatcattaatgaaatttataaagggaactcacctaagcacacactggctattctactggggcttggtaacaatatatatatatataatgtgctatcaatcaccccattgttgaaacttaaaaattgaagtctttcattaatacagttattcattcaacaatcgtttagtaagcaactattacatcagatactgtgccatgttcttaaaattaaagaggctaccccaaaaaatgtttatgacctcaatgtttaacatcatagtccaaatatttcatttggtgatttgtattcagatccctactttaggctctctcctgaaatcagtacacatgcgtgcatacatatgtatgtgtatacatgtggaatccctagattgtacagttaatgcacttggctgctatctgaaaagttgaaggttcaagtccacccagagacacctcagaaggcctagcattctacttctgaaaaatcacccgttgaaaaccatgtggagcgcagttctactctgacacacgtgggcttgccatcagttggaatcaaccccacagcaactggtttggactttgttttttttgtttatatgtttatcaatatgcgtatatatatatgtacacggtgcgtgtgtatatgtctatctgtccatgtgttacttttatcgggagaataccctcccctttaggtttggagacctataatgttaattgaaaggttggtttgaacctgcctagccactctgcagaagaaaggcctggcaatctgctcccatagagatgaccgccttggaaaccctatggggcagttctactctgtcctatagggccgttatgagttggaatggactggacagcatacaacaacaataagcaaagtaacaacctaagtgcaaagaagggataattttttgttatgtacacacatgcgtattttttaaggttgttcagaactattaaagtccaggctaagattcacatccccacatggctgagatggttgcataagaggaagagcggaagctatttaaaataaacctacgtttaagaaatttattacccagctctgctcccataaagattacagccgaggaaatcctatggagcggttctactctgtcacgcatggtcgctatggattggaatcaactcagcggcacacaacaactctaacatggaaagaggccctggtggcacaatggttgaacacttggctgctatctgaaagcttggtggtttgaacccacccggcagctttgagggagagagacctggtgatctgcttccctaaagattacagcctaggaaaccctacggggtagttctactttgtcacatggggtcattaccagtcaaaatcaacttgatggcacctggcaacaacaccctagtatgggcataccttctttggctttccaacaatctctgcagtgcagtcctttgaaaataatataagcgtattttggggacgaactctaacaaaaagttagtagaatggtatctcactaagtgccgagagaattttacaaggatcttattaatcctcttttacttgatgatttatgggtttacattttttttaatattagaattatagaatatcatagctgaatgaaacctggagatgacctagtatcactattttcacttgcttaatggctttaagcaagtggatggcttaaacaaacagaaatctattctctcatagtctagtcggctaaaagtccaaattcagggcaccaggtctaaaggaaggctttcactcactgttggctgttgggggaaggtccttgtctcctttcaacatctgcgggtccagcgtttcttggagatttacatgtgtcttagcatcagtcttcccctgagtctaggaggttctcagcacagagaccctgggatgaaaggatgtgctctgctcccagctcttctttcttggcggtagtcaggtccctctctgctcgcttctctctccttttatctcttgtaagataaatgatgcaggccacaccccagggaaacttcccttatatcagatcagagttgtaacctgagtaacagttaagggactcatagcgaccctatgcacaacagaagaaaacactgcccggtcccgtgccatcctcacaatcattgttatgcctgagctcatcgttgcagccactgtgtcaatccacctcgttgagggtcttcctcttttccactgaccctgtactctgccaagcatgatgtccttctccagggactgatccaacctgacgacatgtccaaagtatgtaagatgcggtcttgccatccttgcttctaaggagcattctggccgcacttcttccaagacagatttgttcattcttttggcagtccctggtatattcgatattctttgccaagaccacaattcaaaggtgtcaattcttcttcggtcttccttattcattgtccagctttgacatgcatatgatgcgactgaaaataccatggcttggttcaggcacaccttagtcttcaaggtgacatctttgctcttcaacactttgaagaggtcctttgcagcagatttacccaatgcaatgtgtcttttgatttcttgactgctgcttccatggctgttgattgtggatccaagtaaaatgaaatccttgacaacttcaatcttttctccgtttatcatgatgttgctcattggtccagttgtgaggatttttgttttctttatgtatacgtatagaggctaggatttacaacacatcgcaacatggaggatcatcagatgacaaatggagaaccaccacacaatgctgggaatcatgacctagccaagttgacacatatttttgggggacataatttaatccatgacaatggtattgccctcttaaaagctattataaacatgaataagcattaaaattttaaaaactataaatgattataattttgaattatacttcaaaacaatgatagtcattaaatgttataaattctaacataagcctccaagtttctgatacaggttgttctatagtacacacactcctgccgaatgtcagagatattctatttttaatgataagaataggagtgattttagctaattaacttttaaaattacacctgaattaactttttatagccagaaataactacagctaagattatttccagataattaaaatacagtgcgcctaatgaatggatatccactacaactttctttacaaagataattatagttgtttatatagcttcattttgtgctttgtgcattcaggattatagtattttccaaaaatatccataaacatggatctttaaaatctctttttataaattaggagcacaacagttatcaaatttctagaattttctataaaatcttaaaatcacaaagctactatttggtaaattaaagtaaatttaaaaaatgttacaaagaatgggccccagaatttcttatgaaaggaatacaatacagagatattctggagggatactgaggataagataagcaaaaaaatgaagctgaacttgatccctaagagactaaagaatgataacactctaataaattattagctttgaggaaataagttctaggcaccacagagaatctgtttgacctttgtagtatgttaaccagtgtatagagtctagatagattaagttatgctaatcacaaacaatgccaggcctgagtggtttgacgtaaaatttattgcttcctcacactacatgttaacaggggctctgttgatggtagtcactctgcgaccatgcctttagagaaactaccatcttgagagttgttggttcccttgtcagcaggaaagagcatgttggagcagcccacatccacaattaaatgcttcaacttggaagtggtatttgtcatttctgctaataactcattgccaaaatgagtcacataacccttctcaactacaaaagggcaggagttacagtctgcaccagtgcatataaggcacagacctggaaatatttgttgatgagacattgtttattgtaatgtttaatgacctagtctttggactagacagttaattaacctgtttgtgctttattttcctcatctataaaataagaacattaaaccttatagacttattgtgagaattaaataagttaatacttgcaaaatgtttaaagcatttttcaaggagatgacattttaactgagactgtaaagatgaggaatagttacaaatgtagaggatgcaatgatgacacagctaatggggaagactgaccacctggaagagggagcaaagaaagagttaaggagctttgtctattgttctcactcacaagtaataattcagcagcagactttgaaacatttcatcccagaatttgtctatatttacaaagctccctgctatttctttaaactattaattacaatttaaaaatagctgtttggtttaaattttatttctgtagtcttcaaataggagccctggtggcacagtggttaaagcactcggctgctaattgaaacgtcagtagttcaaaaccactagccactccgcagaagaaagatgtggcagtctgcttccataaagatttacagccttggaaaccctctggggcagttctactctgtcctacagggttactgtgagtcagaactgactcgacatcagtgagttcttaaatcttcaaatataagttccatagtctacgttaccctaggtggttacaggttccaacaatcataccgctgaaaaggaatttcaatccgaatttctgctttacaggtaaaagttcaagtgactgaatgacttgtcagagtggcagactcaagactagaactccaatcatagtactgtatgttgctttaaataatgaaagaattaagggggagaatcctatctagggctacccttgtggattttctgtcagtgttctgtgtcagaagcaaagcgagtgatatctctaagactataaataatatgtgtagagtaaacatggaattattcactaaatcctaaaacatctaactgagaggtcactacttggagcctgtgaaagtttaggacacataaaaggaagcactacccactaagtaaagattatgtttatggagctcattatccaacaagaggtgggagaatttacaaatataaataggttttacatggcttatataaattaatgagaggccatcacagttattaagaaaaaatagtacatttgggtcatgtcatgaatgtttgaagttgacatcaaagaggctctgctctgccaattctgccaaagacagaaatggcacctggccatgaagccccacggcaatccttgcttccatcatgaaaacatccaaacattgcattttggatgccacgagaaactgctaggctctgggtttgcaaagagaagatggacattcaaggaacccatctttgactagatagttaccaagacaactgttttctcaagtttcttatttccaaacagaagcataagggacacttccacattctaacataacatgaagaatcaagtctttgaattcccatgagaaagttttcctaaggatttagccacactttattccttggttggctcggatgagaagcaggaaaccttcacagacctcctgaacctctgaactttttgtggtttgtccatcaacatatgtatacatccatgcaacaatttaaaaacctcttcttattgcgttatagcatgcccttatattattctttcatttagaacattccttttaccaacccagtatagactatgaacctaatcgcatactccttaagaaaaagatctcatggtctcagtggtgtcagaggccctctctcctatatacctatctggcttccaaagtgatcttttctagcctccatgactgactccccagaatatttcctgctgacaggtgaatcagcttttgccttccatccgaatctcagcttgtgccttctctgtgacaatatcagaacgtccacatcacacaatggcccgagctaattaatttactccagtggctagcagccctgaggcagggaaaagaacgtacactatattgcaaaatcatcaccagcgtgacagcaatgaatgcaaacttcccaaatcatttttcagctgttaaccaaagtttaatgtgattttcaaatgttaacattcagatcatgtggaggaagataatagttccgctttaaaactgcctagaaatggagcttcaatactatagtaatggcttagcactgagccagaaaaacaaattctcttactcatatagtaaatgggtcagaaagaaacctctcagaggtttttacttgtttgtttctttatttttgttttgttttggtgggggccacaaacgagggacagtggaattgcatttttgaactgcatttttattttatttttttaaaaattttattgtgctttaaatgaaagtttacaaatcaagtcagtctcatacaaaaatttatatacaccttcctgtacactcctaattgctctccccctaatgagacatcccactccttccctccactctctgtttttgtgtccattcggccagcttctgaacccatcttccctctcatcttccctccagataggagatgccaacatagtctcaagtgtctacttgatccaagaagctcattctttaccagcatctttttctatcccattgtccagtccaatccctgtctgaagagttggctggctttggtagaaaagattttttttttaataatttttattgtgctttaagtgaaagtttacaaatcaagtcagtctctcacacaaaacccccatacacaacttgctacatactcccaactcctttcccctccatgagacagcccactccttccctccactctctcttttcgtgaccattttgccagcttctaagcccctctaccctctcatctcccctccaggcaggagatgccaacattgtctcaagtgtccgcgcgaaccaagtagctcacatctcaccagcatccctctccaacccatcgtccactccaatccatgtctgacgagctggctttggggatggttcctgtagtgggccaacagaaggtctaggggccgtgatccctggggtccttccagtctcagtcagaccattaagtctggtctttttatgagaatttgggtgaactgcatttttaaattaaatgatctaaaacttgaaacacaatctatctttaaaaagtggtaccttcttttataaaatagacattaaaaaaaaaaaaaaaactgccatcgagttgatccccagcaatcccatgtgtgtcagagtagaactgtgctccacagggttttcaatggctgatttttctaaagtagatcgccaagcctttgttccaaggtgcctctggataaactcaaatctccaaacttttggttagcagctgagcgtgtcaactgtctttaccacgtcagaactccaaaattctcatactactgtcatattatggcaaaaactgggaaaatctgagtgtgaaccatggaaaactttatactctgtcgtcagcataacacctcctgtttccattcactttggctgtgctctagataaatgttttctcatgagctttctttcttctctctagcattatccttcccaagattccttaacattggaattttaagtgttaaattaataattgctcatttcagtgacaatctgaaattcacccccttcttccttgtgaaggccagggtaattgtctaataaaagttctaccaaggtcaggaacgatctaattaactttaagttattaattccattgtgacctcttaactataaataaagccttggcattggaaaaaagatgtgaaacatgacatgggtattaaaaaaaaaaagtcagggagtaaaggagtagtggaggaaaaaagaatggattttctaaatttaaaacactccttgccctttcttgaaataatgatttatattctttgagtctactagaggtaattggatatgcatgatgcaatgctggaattttaggtattttgcctaaaggttattaacagttagtaccactaggggggaaatcataatgttagaataacgaccctctctcaaaggatgactaaaattgaacttgtaatctggtcataataaactatattatgtttattttggagccctacttgttaagaggaaaactgacaaatgagaatatgtccagtagagggtggccatgattaagtgggctgtgaaaaataagttgtatgaggagcagtggaaagaacctgtattatttactctggaaaagcgaacactggggactaacatgagaaacagtgttcagatattaacaaggaatggtacgctgatggaagagtagacgtcagaagtggactgatggcagaaggctgcctgggttgcgcaaacagttaagcacttggctactaactgaaaggttggtagtttgagctcatcctgaggagtctcaggagaacaacctggtggtctactttcaaaaggtcacagccattgaaaaccctatggagtgcagttctactctgacacacatggggtcaccatgagttgaaagtgacttagtagcaactggtggtactaatggcagaatcagggtcaaagggtgaaactcagaggttaagtcatccagtttgaaggactgtctgacctctccctatccaatgtagcaaaatacattctacactgtatctaaaagacagcagcacctgggagctttggctttgacgtctgtagttgtacagagctcactatctcaacaatatcctgcactagatactaacaaaggagtccttgtctggcaacggttaagtgcttagctgctaaatgagagtcaggggtttgaccccaccagccattccgcaggagaaaagactggatgatatgctcccaagattaaaccaaaaaaccaaatccattgccgtcgagtcaattctgatccatagcgaccctataggacagagtagaactgccccatagagtttgcaaggagcgcctggcggatttgaactgctgaccctttggttagcagccacagcagttaaccactacaccaccagggtttccccaagaggattacagcctagcaaacactatgggcagttttactctgtcatatagggtcactacgagttggaatcgcatctgctgcagacaacaacagaggttagtaagcgttagaatgttgctttcggtgaggaggggcaatctgccaggttcttagacaatcgttttccaatggttttcgtggtctgtgctcatgaacattccatgatgcttctaatcccttttccacaaaataacatgttgccacttttttcttttatattctctttatttttaaaaatacgttattgtgttttaggtggaagtttacatagcaaattcggttcccatttaacaatttttatataacatttcccatgacatgagttacatttttcacaatatgtcaacactccgattatttaccattttttgttgttgttctgtttgcattaatctagcttccctgcccctccttagcttcttttctttgttttaggataaatattgaccatgtggtctcatataattgattatttaaggaagcactatattcacgggtgttattacttgttttataagccaatctataatttggatgaaaggtgaccatcaggagaactcactgcattctaaaaacaatcatcaggtctaccccttagtcttctatttgtcaaaataaacatctccaatttcttgcatcattattaactcagtgttatgtaccgcaggtcagtttagtcactggttttcaggcactcccgggtttgtcatgtccttaactggcccccaaataaatacccttgatgcagtttaaccagcaagagtaccgtgtagaatttttaacttccctgatcaagaaaatcaataaacataggttagctgagcacctattatgctccatcctatgctagtcaccatttgggatacaacagagtataaggcaaggcatgggactggacagtatttcgttctgttctatgtaagttcatcatgagtcagagctggcttaacaacaactaataacaaaggcagggtgctgacaatatttgtaaaatcaaaatgaaggtacatggaataattttagaatctttataagatgtacatcattcagggaaagaaaaaaaaaaaacatggtgcccaggcgggctgaggaatcaatgtgaggagttatggaacagatggacctaggctgtaccctgagagatgcggagggcttgtcttattggaatgaacagaaggacgagatgagcaaaggcatggaatgggacacagtggggcactgagagagtggcctcgcgcaggagcgactgtgtgtgtgcgaataatgagtaatgaatgggatcagggatggctggggcatgttgtggctagaaataccaatatttaggtttgtagtgaaacgtttctaatacaactttctttcttccattctaaacatgcttggctttgctaaaacaattttcaaggcttagatttccatggctatctactttggcaaagtaacccttggtaagatgttgcagcatttggctgctaatcaaaaggtcaggggttcgtacccactagcagctccgcagtagaaagatgtggcaatttacttccataaagattacagccttggaaaccctattaggcagttgtactctgtcctatggggtcgctatgagtcaaaatcgacagacagcaacaggtttaagagagtactgctagagctcccttgggtgcaagtgcagatcacagaggtgattttctggacacgcagtttcctttattccaagcatgggagtcttaagcaatccagtgaaagaaactgttttggatggggcaactcttgacacgctttaagttatattgtctcattgataaatggtcccaaaagcaaaagtcctaaactgtgtgtagtaacactactgtagaaacttctgttcagttgtgacatcaaataatttctctttcagggtggtattctataactggcctcatctgtatttttatttcaaagaaaaacaggaagatcaactatacaactgctaaatccaggtaaatacacgttctggctttcaattaccaatgaggctatgagccctcagggaatgctaaaaggcatcaatgtaatttccatttcccttaatgggaccataacccaagttgctcttttttgttgttgttggttaatattgtgaaatcgactttttttttttttttccatcatgctatgcccatggcttctgtggaaaattaaacattattcaatagaacaatttcctggaaaaccttttgaacacggtcatagacttggccctgctctggtgccctaggtctgccagcatgctgttttattacctctggaaaattcggtgccaagagacagcccaggagctaaagcttaaataaaactaggttcaataaaattgtttgttttcttttaagggaaaccgccacttccaattatcagtaattccagatacttattacttctcttctgtcttcattacccaaccctttaccttgcctaccaagatgatgggtaaggattatagattgttaatgctcaagaagggactgctgaaatcatttaattcagcccaggttttttcccattaccaagggaaacccacggcccagaatacctaaatgacttccccagggccacacggttagtgaatggcagaaccaagacttgaactccacattgcaggacatgagccagtgattatagttttgttttatttatttatactatatttttaaaacagtatggcacagtcatcaaccaatcagagcagagcccctgatcgtactgacaggccagcaaacatcagccccaactggactagagtatgtatcagataggtgtgctcatagcaagtcagtgatattttaggatatgcagggaaaaagagcccctaatttataagtggagtctcttgctggagcaaatggttaagcccttgactactaactgaaaggttggtgattcaaactcacccagaagctccttagaagaaaagcctggcgatctacttccaaaaagccacacagccttgaaaaccctaggagcacagttctactctgcaacacgggaggtcaccgtgagtgggaatctacagtaagtaggttatctaaaggagctagcgagctagctagcataataatgataatttactttgagctgttggctgttctctcttttcttcaccattttttccctattcattttgccactaatcattgctttccatttgggtgcctgctttatcatgatttatcctgagctcctctctgacttcagtgtatgtccgtcttgctaaaattcccaagaccttctctgtaaatgttccttttccagcctttcaggctaagccctcattctgtttgtaaaagtaactcaatttatgtgtctacaattgctctctaattcactttatacaatccaaaaccaaacctgttgccctcgagtcgattctgatgcgtagcgaccctacaggacagagtagaactgccccatagagtttccagggagcgcctggcggatttgaactgctaaccttttggttagcagccatagcacttaaccactacgccaccagggcttcctcattttatacaaagtggggggggggggacactttaatattataggccttgatttttttacatgaattttttttaaacctatgatattctcttcttaattgctttctttcaaaattatgatattctttgttgcttctattggtagctcagtggactagaatccagtccaaaaattaatagtgggacagaaaagcacatttgattgttactggcgagagcctttcttctttgtttccaacttgcacattccaatctccagtaattatcaacgtatcctgattgcatgtttgatcaatttcagactgcagaagttggtaaaaatctttaatttcttcatctttggccttagtggttggtatgtaaatgtggataatagtcgtattaactggtcttccttgtcaaaaacaaaaaaaaacccgttgctgtcgagttgattatgactcatagcaaccctataggacagaatagaactgccccatagagtttccagggagtgcctggtgtattcgaactgctgacattttgcttagcagccgtagaacttaaccactatgccaccagggttatggctattatcctatcactgacagcgttgtacttcaggatagatattgaaatgttgtttttgacgatgaatgcaagcaagccattctgcttcaagttgtcattcccagcatagcagaccatatgattgcctgattcaaaatggccaataccagtccatttcagcttactaatgcctaggatatcaatgtttatgtgttccatttcatttttgacgactccagttgtcctagattcatacatcatacattccatgctccgattattaatggatgcttgcagctgtttcttctcattttaagttgtgctgtgtcagcaaatgaaggtgccaaaagcttgactccgtccacatcattaaggttgactctgctttgagaaggcagctcttccctagtcctcttctgagtgccttccaccctggggggctcaccttctggcactatgtcagacagtgttcctctgctattcataaggttctcactggctaattcttttcagaagtagactgccgggtccttcttcctagtctggaagctcagcagaaacctgatcaccatgagtgaccctgctggtatccgaataccagtggcatagcttccagcaacacacaagcccccacagtgcaataaactgacagacatgtgggggattggaggaagacccaataacaacctgcattgtgtagatgatacaacattgcttgctgaaagtgaagaggacttgaagcacttactaatgaagatcaaagaccacagccttcagtatgaattgcacctcaacataaagaaaacaaaaatcctcacaacgggaccgataagcaacatcatgataaatggagaaaagattgaagttgtcaaggatttcattttacttggatccacaatcaacagccatggaagcagcagtcaagaaatcaaaagacacattgcattgggcaaatctgaagcaaaagacctctttaaaatgttgaagagcaaagatgtcaccttgaagactaaggtgtgcctgacccaagctatggtattttcaatagcatcatatgcatgtgaaagctggacaatgaaataaggaagattgaagaagagttgacgcctttgaattgtggtgttgccgaagaatactgaatataccatggactgccaaaagaacgaacaaatctgtcttggaagaagtgcggccagaatgcgccttagaggcaaggatggcgagactgtgtcttacatactttggacatgttgtcaggagggatcagtccctggagaaggacatcacgcttggcagagtacagggtcagtggaaaaaagaaagaccctcaatgagtagactgacagtggctgcaacagtgggcttaagcgtaacaattggatggcgcaggacctggcaatgtttcattctgttgtaacttaaggtcattatgagtcagaaccgactcaatggtacctaacaacaacaacctaacagagcctttcctgtaagctgcaataacccattatacagactggacatgcctgaaaacttcttattcttaattgaattttgaaagaagtgtgaaataaaagtctctaatgaagtaagcattcttactggccgtcggtatcaataataacatgttctcgtcttcattgaatataccaatctccatccttctaataaaaccaaaaaaaaaaaaaaacaacgtattgtcattgagtcgattctgactcatagggatgctataggacagagtagaactgccccatagggtttccaaggctgtaatctttatggaagcaaactgccacatctttctcccatggggcagctggtgggtttgaaccaccaacctctcggttagcagccaaatgcttaaccacttaatagtaactttaaattgtgtatcccatttagcatttgcatatcaccgagaaaaatgacttgttattctacttgcttgacttttttttttttcttgcgtggacttacagataaagttgggcttacccctcatgaacatataagcccataacaatttctcttgattcatcctcagttcccacaatggctttagaaaattgtttatagagactgaaattttctaggcatagtctcttggtgtccctgagtattgcaaatggctagcacacttggctacgagctgaaaggctggaggttcaagtcaacccagaggtgcctcagaaatatggcctagtgatatgcttacaaaagatcacagctattgaaaaccctctggggcacagttctactctgacacacattgggctgccatgagttagagtcgactgaaactgaaagtggaaatagtagtcacctaggaactaagaggaaaccccattggcatagtggttaagagctacgtctactaatcaaaaggtcagcagttcgaatccaccaggcgctccttggaaactctatgtggcagttctactctgtcctatagggtcactatgcgtcagaatggactcaatggcaatggtttggtttgggtttttttggggaactaagaataaaacatgctcccaaaggtttctatgctttcaagattagtgaagttttatgtttgaagatttctgttttatgctaagtactgtgaaagacatgaagaatgagaagacttggtcttacaggtcaaagcccttaagggatacaagaccagtaccctcatgagacaatgaggaaaggagactgtgtaatagagggcgttgtgctatacagatcatggggttaagaagacagccactgttgcacgtttggaacattctgcaaaagcctcacagaagcagtgtgccctaatgatggtggaaaataagggggaagaaccagagaaggcccaggtctacacaagagatcttgtgtgttagtatatgtgatcatagtggttgagcagagttgaaggttggagtggtttaactttctctctcaggtaggctttttcatctgatgaaaataaaggattttctctacagagaacacatatatgatatttaaccagtgagctttcagcagaaggcagaccgctagcagcaagtaagcccagatccctataaaacagcactgtgaggtgttctgggccaggaaacatgccagaggctgccaaccccaaccaaccctctgacagacatttgcattcttagaaaattttctctgctctgagatatctagagtatgactctactaactactttagaatttggtcagcctactcctgattctttgattctagggtactttcaggtctttgctcaattatttatgaagtttaatttgtaatggaaaagtacacagtgtgccatagttacaccctctgagaaaaaaactacctttggtgtttcttcttttcagagaggtccaaacacctctctcagggaatcctggaaggcacaaaaagaattgtgggtaagcaaacacattactggagccttggtggcacagcggttaagagctcggctgtgatccaaaaggtcggcagtttagattctaccaaccgttctttggaaacaccatagggcagttctactctgtcatgtaaggtcgctatgagttggaatcgactcggcagccgtgggttaaatgtgttgctatgaaccctagtggtgcaatggttaagcactggctgttggtcgaaaggttggcggttcaaacccaccaacagttctgcaggagaaagacttagtaatctgctcccgtaaagattacagcctagaaaaccctgtggggcagttctaccctgttacataggattgctgggagttgaaatcaactcaatggcacctagcagtagcaacaaacacattactcctttttactccaagcccaaaaccaaacacattgccgttgactcaattccaactcctagcagccccacagggcagagtagaactaccagagagagtttccgaggctgtaatctttacaagaagcaggctgccacatcttcctcccatggaacggctggtggattcgaacaaccaaccttttggttagcagctgcgcgcttaacaactgcgccaccagggcgccttctttttactccagggttactcatctgtagagagatgtagagttcaatcctaacaatcccttcaaggaaaaaaatcactagtacacccatacactaatgagttagtgaattctttcctttaaaattaaaattaaatgcaaggccatggtaaattgcccattttatttccactcccaggaaaaaaggcaccttgtcatcccttaatgtgggtccgcttcagctttaatacacgcatttatgtcaagcagaccgtttataccattgcctgctggagtttttctcctttcaacttagtagggaatatttgtgatctttattactcccaaataaatctaccaaatgccttttgcttgaggctccttacttgaatttcagataaataaatcacattaggttcctggtcatcatattaagataagcatgaatctaaaaataacacgtgtgttctaaccaaatgtttttagattaaatagtggtaaatttctctgggtgcccaccacatcctactgatgttgaaatattttctggtactttgggaatgtttcttgaagaaaataaacctgtttaaactagaagcagaattatgtttaaactcatctgtgaacttacctgtataacattatccaactcagatctccgtttttgcagtaaatccatctttaaagtggggctatttccccagttacctgggaggagcatctctgtaggttaatggaatgactctatactgtaatttatttattaactataaagaattcttgcccccaactcctcactgtcctcgctacagttatactcgaaagccttcaaggcaattcaaatccaatccattcagtaacacactccttatctgccctcactccagcaaacttgcccatattcaggactcagatcaaaacaccaccttctctgaggaacttgtttgaactaagcaccctcccccagcccctgtggaataatttcaataaatgtatgtgaatttttcttatagacaaggtttgaagaggctcaaacaaagtctacagtctaatttgtacatagagtccctggatggtgccagtggttaagtgctcagctactaaagagaagtttagccactagaatctgcccaggtgtgcctcaggagaaaggcctggcaatctacttctggaagataaaccattgaaaaccctatggaacacagttctactctgaaacatgtgggatcgccctgagtaggacttaatggcaactggtttaaatttatacatctattatgttagaacctaaatatatgtcctctggtagattagcatggccatttaattcagctcaggggtggagaggaagggagataatgttaagcgtggtagctctggtctcctttgacttcaggagagtgagacagggatacaaagtgggaaatccacgcaccattactgagttagcacagtgtgagattttgctttcagagcttctattgttattgaagaacactaagctctcactttgctacacattttatcccccagaaaaaaaaacaaaacaaaactctattccgactcatggtgactctataagacagagtatatctgccccatagggtttccaaggctgtaatctttacagacacagactgcggcatctttctcctgtgtaatggctggtgggtcaaacagccagcctttcggttagcagccaagcacttaaccgctgtgccaccagggctcctcttatccaccagaggtagcctctttttctcttgaagggattaaaaaagaaaaaaaaacacagttcttattttattctatgtccaccgttaagaattcatgcagagcaattttacttgtcaattaagatcttgcagtggaagtctatgatcacagcaaaggcaacctgtttaatacttggcacctccttagttcacataaattaaccacatgaggataaaaaaaaaattcttaagatgcctggataatacgattccgggagacatagaaggtaaatctccaagagactctgaggctgatctgcttggggcgtatgtccttatgcttcttgcctctatcttacaactataagacaatttctagataacacattaacaaagaattttcttttcccagagataaagtcatggcatgtggcctcccagtaagcaattttaatatcactctcatacttgcggatgcattttctcatactcacacttcatagaaatttagatttagagctagaagaaactttgggtccaggtgccaattatatccacccaaaaagatcaaaatatgtcaaaattatggtgaccataaatgagtatttgaaatatggatcatttttatgtcaatatccactgtgttaggtaagtaacgttggaatcgtgatgagaatgaagacataatttttaccagtcacccccttctccatttctttccttaaagtaaaaaccacaaggaaaagcaaaagcgaaaaatctattttaaataattttggataaactaaaatcatcatgttatggctggacgaggtgagccttacgggatctttttccccctaaggacctgtccatactttataattcagtacttcctccctctatcccccagccccttggtgatgtaggcaatgccgtgtcttcccttggggaagtaggggttcagtgtcttactggggcaaacacagagtcagttccaactcatagcgaccttacaggacagaatagaactgccccatagggttaacataaaacgcctttatttttcttgtaacacctataatatcatgatataggcaactagtgttttatgaaatatacttaggaaaatgcttgtgtagttgatttatttagatcagttctcagctggtgggagggagagttgtcatttttgccccccagcaaacatttggaaaatgtctggagacattgttgattgtcacaacggtggagtgcccctggaatctagcaggaagaggatgctgccaaacagcccccacaggaaagaatcaatccagtcccaaatgttaacggtgccgaggttgagaaaccctggtctagatacagcttattcaaatgggattttagtgatctcaactctgtgggttggcagctggccctctctgttttcaccagatcttgtcatttgattttggacgtgcagacccacttacttattctttactaacttacagatatttaatgacaccatctccaatgtgagtcatgagaatctgacaggatactttgacatcatttagttgagttactggcaaactgacattagttatttctactcgtatgctctttgaagctttttatggtatatgtattgtgcagctgtatcactgcataaggacagccggagtggcacaagcggtttacagtctgctgttaacctaaaggttggctgtttaaacccacccagtggcttcatggaagaaacatctggcaaactgcttctgtaattacagattacagccaagaaaaccctatgaagcagttttactctgtaacacatggggtcaccatgaatcagaatagacttgatggcaatgatttttttaatttttttagttatcattgcataatagtaatataggaaaataaaattatacatgtctgtgtaatttctgtacatgttctaaggagtcctggtggtgcaatgattaagtgcttggctgctaaccagaaggttggtagttcgaaccccctagccactctgtgggagaaagatgcggcagtctgctcccatacagatttcatcctctggaaaccgtatgcggcaattctactctgtcctatagacttgctatgagtcagaattgatggcaatgggtttgggtttttttttgtttttgtacgttctataaatgtgatataattacttgtgccattattaagtagcataggatcacaatgttcagtaatcttaaatgctagttattttgataccttcttttatagataaggagactcagactcagagaagttatccaataaccagtctgggccagccagaaccagagcccaaatctccacaattcccagtccagcctctattattacagttttgtgctgcttctccgtttcatacataatttcatatacgtggcatgaaagagtaatttcagttccataaatattcatgattgagcttgtattttccaactgtttgtttgttctaaactctctaatttgaaactgggtaaagatttctatccaatgttaagaaaaagacattctcagcagttgttttcttagcatttttcttgtcagtcatagacatatttagtcaaatttagaaatagtaacagatgatataaaaaataccaagtgcaaaaaagcccttctctctgaatcctaactttccacattaaaacaagtccacatgcaaaaaattacaacgattccctttcagcatcaactagtataggggttgtcactgggtatgtttatttgcatcccacccagacttgtactcaagccttagcctaagttctggattcttcttcagatgaattcacacaagttttcctctttagaaaggattcattggtgtcagaaaaggcagttgagctaaatgactgctcatggctagagagctatatttgaactccagaaattcctttgcaatttgggagctgagagagagattagagatctatttcagtagaatactaaacaggaccccaaaataaccagttatcttgagagtgatcataacaatatatttttgtgtcacagcagatggttatgctataagaaatgactaaaatctattaaagactagtagctccctccatgaaaatgagggaagactttttttttaattcctcgtacccagtcctctaccatcatttgtctaattctttcatcattcagcaagcagcagtaagagcgtgccttgtgcctgccacgcttttgattaatcatcaaagatggcggccataaagtaatgcttaccacaatcattgctggaagatctaaatatgcagaatctgtcttttctcttaagttagctcaagaataactggaaggccatcagttaatattagcagtaatgacaagtagcccactccataaaaactgcagcagccacaaatcaaaggcttaataaaatcagagagggagtctgtactgatttatgggaacatttgtttaacttcaggcaatccagttatgcttgtatataggacatgctattcccatgatcctctgcacatcatagattccaccctaactcatgagtaaagcatttaagaaatttaatcaaaactagaaagaacttcccacactgctcactgtcactcacatatcctttaccaaaaacaatttggccaccgttgtagttttgatattgtaataaccatcataaagcctatcactttaagtcagtcaagtcaggatctgtttgcaaaatataatcgaatgtaatttcatgagtcaataaatagtatataaatctgctattattagttttcattttcttttcaatactacccatttccattttctctccagtagttattctgactattcaaatgtcattattacccaccactgttattcaaatggagcttttttattaggttttctgacactatatattagacttcacttcttcgacagcaataatttcatttctgaaggaaaatggaagagacttacgtaaaattctgagctcttagtttatgttaagtccatgcctgaaatgggattttaatttaatcatatctgagaagaccaaaaggtttttattgagctacctcaagaaagcagtttttaaaaaacccttttccatgctgaattttcgattcaaagatccgatgaatccattattcctctccaatgatgtatataagatatatttactgacaaaattcaactctaaatttctttcgtcagctagtattcattatttttctgtatttttttcttgcaagatggggtaaacaaaatatcccctgcaaatagttgaaataaaatgtcacaattcagttaaatagtttaaaaaacatactttccaggatatccatggaaaatgtattttaaaagtcacataaccataaatatatcattgttgagtttattaatataatatactggttcataaactaaaactatatcaaaaccaggttatagctcctcaaaacaaatctagtgaatactgcttcaagttatataaaattatgtgtctgttagtggcaaacacgtttataaaattgaacacgcttgtcagattctaccagtttttctatgtgtataaataaaccagaaaactgtctgccatttggaaaaataatataatagcataaaattttaaaatatctggcactctactcaagaactagaatcccccctgtgatgatgaattttaaggttattttaatctgtctcagtgaggcacaaagaagggagacatagcctggcacagagaacaatggggatggctttggataggttttggcaaaacagccagagagtaaatatttacagaacgtatctgcgtacagggagccctggtggcatagtggttaagagcttggctcccaaccaaaaggttggcagtttgaatctaccagccgctccttggaaaccctgtggggcagttctgctctgtcctatagggtggctatgaaccggaataaactcaacagcaacgggttttgtttatctgtatacagggtgaacaccgtcctcaatgctgccaggagatacaaaagaaataaagcactttaggggcttacgaacccatgggaaaataaagctagttatatgaaaaattctggtataatgttaaggcatcatataagtaagcattagcatatttattttgtattaacaagagctataggaatttagaaaaggagttcaaattccatagcagcacctatgaacatcatgaccacatggaccctgaaaaatctagataatacatcacaatcatctattcaatttccaagaagccccagagagagaatgagtgacttgggaatatgacttcttttatagtcacctttttttctaattacctgcccaaatggacttacataccttttctcacctagaatcagaacgtaccatattattctctcatcgaataaaaacaaatcactgtagacctacctatataacaccactcttaaaatacgccccttagtattaagagaggagtcccttggtggtgcaaatgattaacacattcggctgctaactataaggtcagaagcagggcttccaaccaattccttccagttggaaacactgctaagaatttgcatttctaccccagatacactgaatctgaatctacaggtgattcttatatatagtaaatttttcagaaccactgttctactagtggttctcagaattggtccctaatcagcagcattggcacctcctggcttactgacagagtggggtgcctctgagcacttactggcagagctaaagaactttttaatactttcccgagcagggcagagaccaggcagaggggccaaggggccatgggccagagagaggcctgcctatggacatggctgagaagaggctgtcctgatgcacacggaccttcctccagagccaacagagagaaaaagccttccccacaagccagcgctctgagttcagacttctagcctactaaactgtgagaaaatacatttctgtttgttaaagccacccacttgtggtatttctgttatagcagcactagatacctaagacagaatttggaaagaactgcttcaaacccctggtttgaagtttgagtctatccagagatgccttgaagaaaggcctggtgatctccttccaaaaaaaatcactctggaaaaccctatggagcacagcttcgttctaacacacatggagatgccatgagttggagacggcatgagagcactgttaattttcttcttaatattaagataaacacaaagcttaagcagacgttttatacgttttaattagaggaagaatcaaataatcactaaactggcaagggtcagagaatttgaattctagtttccacagcattacaaccttgccatgtggccttgggcaaattaatttcttgaccttgctaaatttcacaatttccaccataattcgctatgagtcagaattgactagaaggcaatgggttccagctctgagtatgcccataattcaaggacaacttttagcactgttgctccactttcatccaaggaatggtattctctaggtagcctctggtgacttctgcatcccaacatgtctcttgcaccaagtggaagaaggagcctttttccaactccctgcctccataatcaagataaaacttagaaagaccactgccagaggaaacaaatgaggtaaggatataaatttaactcacctccagaggcttctgtgctgctcctccagttgagttaacagatgctccaggtatttattggaatccatgtactcctgcacggacaaagacaaagcaaacctcattagaggagtcaccaccactctcagagtctctccttatctccagaaggaaggtttttgacaagataatcccttgggtcccttccagttctggaagcctctgttctgtgaccagtatgcttagtcatttggaatgaataatatttcccccacatcctgtgatcactctataaagaaagcactgaagagaactggaattctacagattcagcaaaaaactcctcaatttacatacaaaaaagccttaatgtcatgtcacatagccatctacatcggggtccatgtcctactgtctaaaggagccaatgtagttgttaacctaagaaaaatcagaataaagtggaaaatacaggtcttcactggtcatttgagagtcactttctagccaaaacgctgtttttaaataatatggggatgttttaagtatgcacggagccctggtggcacagtggttaagagctcaggctgctaaccaaaaggtcaacagtttgaatccactgggcatattaaaaccaaagcaggaatctctgttcttgcaggaagttgcaacagtctgttattatgggattacacaccctgatcaaggctgaaatatgatttagagcacttgaaatcatcaaaggcattaattctcaaatacattcagccaattttttttttcaaagacactattctaaactggagtccccaggtggcacaaatagttaagcgctcgactatagctggcagttcaaacccagccagagatgccttagaagacaggcctggcaatctgctttcaaaaggtcacagccttgaaaaccttatggagcatggggtcgccaggagtctgaacggactccctggtaactaacaacaacaacaatcccgaactacaaatgcattaatttcatactcattcatccatcctttatgcagcaataatctttcaaacatctattatatgcccagtgctgttctacctgttggtagatacagtttgctgttctaaggcagaaaaagcccctgccccttagtagcttccatcctgtaggggaagacttacaataaacaagaaaataagtaaatggacaaactgatttgagatcagatgcatctgggaaggaaataaacagtgaaaagaaagtcttttaatagggaggggcaggtactttagataaagtggtcagaagaggactctttgagcaaatggtatttgaactaagacctggaagagaagaaaatggcaaccacgtagagaaaagggagaagggcaatttgggcagaggaaaccacatatgcaaaggtcctgaggtgggggtttgaggaacagaaaggaagtcatggggttgggagcaaaggggttggtgggagggtatagtctaaaattaagttggagaggaagatagggattaaatcatatacaagccctgaaatgcagcttggacaaaaataataataatagccttttattttattcattctgcttggcccaagtcagatgttgctgaatggtgtactgattaaaaatacaatctttgggttagagagatttaggttcaaatcctggttttgatacttactagctatgttcccctgagcaagttatttaatctctttaagccttaatttcttcatctttaccagagggataaataacacttactttatagagatgttgtaaggattaaataaaatagtgtaaagcatatatcatagtatctgccaatatgggactgaggccaattagtgaacatagtctttatactggagccctgtttgcacagtggttaagagctatgactgctaaccaaaaggctggcagttcgaatccaccagccacttcttggaaatccaacgggggcagttctactctgtagggtcactatgagttggaatcgacttgatggcaacaggtttttagccttttttatagagttttatacacctcttctcaaaggcaaatcacctacaaagtgaaggtaatgtccattttctcttctattaccaaactttaagatttctaagtgtatgtatggctcttaggtttagttgcttaactattaaaacaggcagttaggcagagattaataagaatatagacttttcagccattcaatgtaggtgtcactggattgtggcttaaaagtgatttcaaataacgatactggccactttcatttgaaatacccttatccaatttcccataaaaataactatgatgacaaatattaaaccctttaataatgagaaactaacaatatttttggattttacacatatcgttctccctaacactcctgtttctaagaagcaatatattttccttatgcagtttggtattgcctagacaccaccccctccccaaacacacgcatccacatctgcgctgtgaggctagtggtaatgaactgagaataacagtatgaagctttttttttttttttttttttacgtataccttctgttaaatgaaaccattttccctacctaaaagaacttaggaattaccctcatacatctctcacttctagcccctgaattggagaaattagataactagtgagaaatttctagactgttccgtaaaagtgaaataggagttttccactgggagccatttttctccattcatttagagattccaactcaagaaaaaaaatggagagggggctggtaataggctggcagtggtgcacaactgaactacagacacacaagttcaatgctgtaggctcagtggctgtaacaagagtgttggtagcaatgcatgctaggtgttgctactgtgttcctattgttccaaaattaccaacacacaggtaggaagaaagggtatggcgagatttcaccttagtatagccacggtccctaaattgcttgaaagacactttatgttgggagagcttagagaaaagatttctataaatacaaaatggacagaaagttgagtccacattctctgttggcactcctaggatctggatagatcatttcagaatgagtaactaaaaataatataatatggaacccatgaaaatgtattataggagaagggaaagagagaaatcaccacagcctcagaggagggtctgactctgaaaatgacttactggagaaatgtgaaacaatgttataccaagccttggaatgtttggagtccatgcatagcacaaatagttaagtgcttggctgctaacagaaaggtaggaggttgagtccaaccagaggcacctggaagaaaggcctggcaacctacttccgaaaaatcagccattgaaaaccctatggagcacagttctactcagacacatggggttaccatgagttggaattgactcattggcaactgtttttttgtttatttgtttgttttggcatgtttggtcgtatccaggcagacatggtcactctgaaacatgagcgaaaagcctttttttaaaaaagaagctaagatgaaattacagaaaaattagatttaaaaagataacagggtgagttgcaaggataataaaatgaaataaaaaggaagcaggctgatataagaagtttgaggaaaactaaaatgcagtagcagaattaaaacctgttggtccctacattttgatgtctactatggggtagctctcccgaacatgaaatgatgcttttagagaatgagtaattgaaactataattgctggccaaatctcaagcatttgtctggaaatgattttggaaaaaacagattttggtgtatgggcatggacttggtcacactgatgaaagtttacttctcagtatctcacctggaaataaatcaaatttcccaacctaggccagttacttaaaactcaccttctcccttttcagtagtataattcagttagtgtatgaaggctacgcctgctataaccaagaaaaccccccacaatatccacatttttctttctgtcaatattcactatttgtaatgcattctgtatgaaaattatcaattttataggccagcctgtacatcctatgttacttaggacaaatatagatataaacttgaacgtcctattctgctggtctttcttataattataaaacccacttcagttagaagaattgacaatgaaacacacacacagacccatggaggacaaacttagtgatctgtgactacataaaaaaattaagggaaaaacatgaaaatgaacaaatgtagatatttaaaaaaaaaatggagatttgtctagcaattatagtttaagtatttgaaaagaactgaaatgtaaacaataatcaacaggataattaaaggaaagtttcagaatagaataggaaaataaaagggacttctgcacatcaaaaagtcccatcacattctaggtggaataaatagaaaactattcacacatccactggcacaggaataaaaacagcaaggaaaacggcagcaatcagccatacagaccaacatgtttcctgcaaaggagcaaaaaaggctggctccatggctttcagccaccccaaatgcccagtgaagttaaatctgtacaaaaacctttgagtcttaacccagaaatcatattcccaatcaagtactggctgtatattgaagcaacagaaagacatcctcaggtattcattgattcaggaaatacagcacctacttctttcattaaaaggagccctggtggcacagtggttaagaactcggctgctaaccaaaaggttggcagttcgaatccaccagctactcctatgttgttgtggccactgtatcagtacatctcattgagagtcttcctctttttcactgaccttcactttaccaagcatgatgtccttttccagggactggtctctcctgataacatgtccaaagtacttgagacgaagtctcgccatcctcgctgctaaggaccattctagccatacttactccaagacagatttgtttgttcttctggccccaaaaccaattgccgttgagtcgattccgactcacagtgaccctacagtacacagcagaactgccccatcgggtttccaaggctgtaaatccttacgcaagcagactaccacatatttctcccctggagcagccatggtatattcagtattcttcatcaacatgataattcaaaggcatcaattctttctcagccttccttattcattatccaactttcacatgcatataaggcaattgaaaataccatggttttggtcaggtgcaccttagtcctcaagatgacgtcttcgttttttaacactctagtggtttacagcagatttacccaatgcagtacttcatttcatttcttggttgctgcttccatgggtgctgattgtggatccacgtaaaatgaaatccttgatgactgcaatctcttctccatttatcatgatgttgctcattggtccagttgtgaggatttttttttctttatgttgaggtgcaatccatactgaagaccttagcgtttgatcttcatcagtaagtgcttcaagtcctcttcactttcagcaagcaaggttttgtcatctgcataacgcaggttgttattgagtcttccgccaatcctgatgccgtgctcttcttcatatagtcaagcttctcagattgtttgatcagcatgcaaattgcgtaggtatggtgaaaagatataaccctgacacacacctttcctgactttaaaccatgcagtatacccttcttctgttcaaaagactgcctcttggtcttgtacaggttccacaggagcaccatgaagtgttctggaattcctattctttgcaaagttatccataatttgctatgacccacacagccaagtgcctctgcacaggcaataaaacacaggtaaacatctttctggtattctctgcttccagccaaaatccatttgacactggcaaagacatccctcgttccacaccctcctcagattccagcttgaatcccagacagtaaaaaaaaaaaaaaaaatgaagtaaaaggatacaaaaatctctctctgtagatggaaacgttttttacttgaccatcagaaaaacataagtacgatggtgttttctgcctacatttatgcagttttgggaaagcacttaggtagtatatggcatgaagtttagaacatccaagtgtctttgatcctgaaatttcatgtctaggaatcctgtggaaataatcagttgtctatttaatggacacttaatgatgtccattcaaacattatttatagtaatgtgaaaaaggtatatcttaatttctaaatatataggtatggttaatataaagcatcctatatatgaagaaatattatataattcctaggaaacatatttgtaaagaacatataataaaatggaaaactgtcagagtatgatatgaagagaaagaagtaggatttatatctgtgttatcccttttaccacaatttagaaaatacatataaaggattaaaagaaaataaagcaaaaaatatgttagtattatggattactttaattttcttctctatatgtttctttctatagttttaaaatactttatgctcactatataaacttaaagagtgaaaattatttagaaaaaaatacagccccagaaaataatgttcacaaaagatttgattataattaaatctgagaaagctagatcttcaaatcaccttgaaattacttccttcgtattattctaaaggtaagctggatatttgaaacaatgaccccctttttgacttgcccttgtcagcatatgttctgataaaagcattcactaaagttaggactgggagaagcaccaagttacagaagacatatttgtataatctgtcttaaaaatttttacaaaggtgcagtattgaaaagacatctatctgttctttggctaaaacttacacaaattagaatcattttggagatacatttcaggaaatttgcctttcatttcttttaatgcgtatctttcagggcaattagtatgaaacgttcaaactctatggggcagttctactctgtcctatagggttgctatgagttggaatcaactcaacggcagtgggtttggtttttttttttttaaagagattagaggcgtatagatacgctgaacattgcggacctgtgtagcataagcctatttaatgtgaacctccccttgtctgaagtaggccagttctgagaaaggcttattagaaatgaattctaagagtgtgaagatcttatgtatcattctgtttaagtggagttgaaaatatactatatccaagtttgcagagatccaatatcctcccctccccaccacaatctctatattataatcagcataatttatggtggaactcgtgaaatgctgtcagcaattttgccactaatgatgtaggattcccaatgcacctttgggcaacaaagcaccaaggagaaagccagctgttcaaaccaacgagaatatcatcagacagaggaatttctacaattaggaaatgactaacaaccataacaagtgttgctacactcaaaaattagtttcttgtcttatgaaaaggtgcatcagcatggtgaatgaaagagactacagcagtgcatacctgctttgggaattacacagacgaggtaatggatagaacactgtctcatagttggcaacacagaaattcttccaatgaaacatttttaagtgttaaaccaccacaaacaaagcaattcaggagtcctgacttttaaaagatgccatcaagtcgatgccataatgacagaacaaaactcttccctcagtcctgcatcatgatgggttggggatcagaccattgtgatccatagggttttcattggttgatttttcaaagtagaccatcaggccttttttactggtttatcttagtctggaagctctgctgaaacctattcagcaacatacaagcctccactgacacacgggtggtggcaggaattgaacctaggctcctgcacggaaagtgagaattctaccactgaaccaacactgccccggttatattgccgttagccttctccattcccttttccaactttctctcattcactcttcaaacagcaaaaaaccttccttctactgcaaactcttcagtggaactgctgcattacagccacaaatggtcttcaaaaggccagatctcatgataatgcttggcctaaccagtttctgcaacgcttggtataaccatttctttctgtctctcccccttgaaagtgttcttatgtctctatcactccaagaacctcctcttaaactcttcccttcttcccactccttcttcctgctccttatgtgtcagagtaaggttctgttcttggtcttctttcccttccttccgggcaattccatcaggtgctatggcttgaagaacaaccaataatctagagactcccagatatttatctccaaactagatcactctcatctcactattgagggccaatcctatgtatctggctatttgccaaatggtctccttgaatgtgctacaagatcctcaaagtgtgtcttacttagttttttgtttcttttttttatactctaacacctagcatagcacctggcatgttgtaagtactcaacaaaggtgagataggtagatggtaggtagataggtaggtaggtagatggttggtaggtaggtaggtaggtagatagataagctagatgttgtcagcttcataacaagagaatttaaaattattagagtattagtctggtcttccagaattatgttttaactggaaaggctataacaattatagacattaggctattttccaaaattactgtatacttatgcatttactatattagtgcaaaccgggaataggatcccaaagataacctactgatcattttgtcaaatcatcagtgtgctcttctgattttataatcctgaagaaaatttaggtatattgctcacctatgtcatgtaagtcatatagactgtcaaagatttcaacacagcacagaaagtcacaaccaaagtcctcaatcaaataaaggggtaactgatagcaaacccaacagagtaaaatcatatacctctatgaaactatgaatctgtcatatatgacactttaatacaaattaaaagtggtagagtatagacatatagtacacttggccactgaaaacttttgttgcctgctttttggtagcaagacagtatactaataacaattaacctatgagtacagcttagcatatacatagagtaaaatacatctcatcaattttgttggagactactaagctgtcccccagcatatattttcccttattccttttaaaagcaatccattctccactccagttttagctggatacatgactcatggtctagagattgtgtttcccagtctcctgtgtggctacacttgaacatatagctgagttaagccaataagatgtgaacctaaatggtatgtgcaatatccagggtatctccaacctgaagacaagctccttcctctggctgggaagggcaacaactctagcagcaaccttcagcctagagacggaagccacatgttcagtatggcaaaagttattctcttagagcactctgttcacctaccctaatctttctgcctccctttgtcgtcttacatgaaaaagaaataaatttctatcttattcaagccattgtattttagggtgatctggttacggcagcttagcctatactgtaaattatacaataaatattagtcatttcctttaaaagttatcatggcaaatagacaaaagtaaaatactaagcagtcaacttaacatctctagtttacttaaatgattgatggagagactggtcgttatagttttccaaagcacttagatatctattctcatttgatcttcacaacatttttgaaccacgtccaccatttcatattagaaaactaagactcagattatggttaagtggattggttaaggtcaaacattgacaggtttaagaaaggaaataaggtttcctatctccagttcataggtccccggacagcacaaacagttaacccccaactactaactgaaagattggtggttcaaatctatccaacagtaccatggaaggaaggcctagtgatctccttccacaaagattacagccaagaaaagcctatggtgctcagttctactgtgtaacagatagggtcacaatgtgcagtgcaatgagtttcctttttttttaatttttattgtgctttaagtgaaagtttacaagtcaagttggcctttcatacaaaaatttatatacaccttgctatatactcctagctgctctccctctaatgagacagcatacttcttctctccaccttctatttccgtgtccattcagccagcttctgtcccactctgccttctcatctcccctccagacaggagctgcccacacagtctcatgtgtctactttatccaagaagcccactcctcaccagtatcattttctgtcttatagtccagtccaatccctgtctgaagagttggcttagggaatggttcttgtcctgggctagagtttcccttctatatggcctttccagccctgagtttgtaattctcccaaaatgagtggtcaggtcacaatcttgcaaatgattggtctgtttactatccacatgagtggcttgcagggattggtcagtttactaaaaaccatataagtggtttataatccacccagtaggattgagtggctagcagtccacctagggaactggtaggtttaggatcctgctggcagggccagaccctgagactgacaaggagcttctttacataaggggccaatctcaaagaggtttttggggacctcattcatgatcatcaaggtcatagagctgagtgtgtgccctctggacctggggtccctctgctaagaacctcctagacccaaataaaagagctataatgctgaataagggctgtaacactgaagacagagagagacagcgggtttgttggcccatggagctagagggctacagccagagagaggagcgaggcacacactgggcagcaggtggtcaccaacagagttggacacctttgtgcagcggttgcttgtggagactctgaaggtcctgggtatgtgtgttggggtgggggagcatcctatagctggaagagctggcgactccagacccagtgaggcccagtggccaagcagagcatggcaggagctgagggagccttggctgcctggtgcctgaaggaccgggtagtgtggcctaggtaccatggcaggagccagaggcacctgtgacatgaaaacagcatctgatctgaactagggcgtgcctattgagtaacataagtatgggcatgggttatttgagggaagggtgagtggttaaccctctgagacgtgagcgttttctctcctacaaagtgggggttatgtgtagaaggacgggactagttcactgtaagtaatctgttcctgttgtttactgtttgctttctacaataatgataatcactttcactttgcaacactgtgtacatgtctggtgtatgcagctccatcatcctggatgaatgtagcacccaggagcagttgataccactggcagagccctcattcctagcagtcttaatgctgctgagaagctggtgccacagtctgtctgcatgtgcgatgcagacgctatgagttagaattgactggacgacaatggatttttttttttttttaatatcccagtctggcgcatgttccactgccccagaccaaactgaagcacagaagcccctccccacagctaactaccctcgaaggagactctgcattggtgagatgaagactagaggcagaacaccccctccccaatttgggagtatctggctctacgcaaagccgtgcaataaaatcaggaaataatcttccaagttcatgttaaatgtatgtctaagtctggcttctcccattaacctttaattctcctgtacccgttcaatgaaggtacgggaagaaattaacctgtactctcactttcaacactctattctaatgaatgaaaaaaaaaatgcaaactcaagtaaatacgttttaattatatcaaatttgacaaagatactattagttacttagtctttcttaagtaaaatacataatcaagacttttacttggtttttaagtaaaaaagttttgtgttctttcttaaatattgctttgataacatttgggagataggtatatattggtcaaatgaaggaattcagttaggtggaaaaaataactctacttattttaagtaatttatttatttttgcctgaagtggaaatggaaaaaaaaatcaatcctaaagttctaaaagtcagtaacatatcatttgtcagcatggcagtggattgtatatatatatgtgtgggtgtatatatatatataaaatcaatcaccataaaaatataaatgatatggttaccagagttctcatttcaacctctattcttgctttttgatggagaaacactgatagagccttatataagttgaaagcctcaattaggtccccaccccactctaagtagacaagtttggacacggaaagttcaaggactaaaaccaaattcctgtacacccaaacacagcaggaattggccaatggatccgttataacaatatactgtgcttttctacatttcccttcaccacccaaatattgcttcctgagcctactattaccaacggtcttcaaaatctgaccacttgttatgtttaaatttgatcttctattacttcccagagatgtcttgggactctagtgagactaggctccttgattttcctgaacaggccaaagtatgaactctttgtaagaccttattgccatcaagttgattttgactcatagcgatcctataggatagggcttccaaggctgtaatctttacagaagcagactgccacatctttcccttctggagcagtgggttcgaaccactgacctttctgttagcagctgagctgttaaccactgcatcacgagggctcctcctgaacctacctcagaacttacaaataataggtgcccaaggaaaaaaaaaaaaaaaaagaggtatgttaccaacaatgctacctacagttagaatcactgccttaaggcacttctagaaaccagtgcgctttaactgggttacagcatcatttgaggatgatatactatgtgcccatactagtggttctcaaatttgttcatcttttatcacctgaagtgctggttaaaacacagattgctgggccctaacttcaaagagcctaagtaagtctgggatggaacctgagaatttgcattcttagagtcatcatttggggacaactctttgaggatccctggcttatatcttcagggattgccttccactgtcctctttaaaaatattcgtaagacatagtgaaaataagaacaaattcaattattcaacaaacactttccaaatatgctcagtcttccaggtctaggggatacagccataaacaacataggcacaagtccttgccttcgtggaggttatatttttgtgaaggagacagacaataaacagaagtaaatggacgtaagtgttagctgaaaaaatgggaaaggaagggctgaagcagaggggtagggttaacagactgatggatgaagactacactgaagatacaacatttgagcaaagacctaaagaaaatacaggagctagcccatgtgagtatcttgggggcatcctcctaggcagaaagaagaacaagcataaagactttgaggggtactccaggaaaagcaaggaggcggatggccagtgtggctagaacgggatgagaggaggtcacagaggcagcaggtggccagatcctaaggacctcactttcactttgtctttcgctctcagtgaagtagggagcagttgcagtggggtttgatttcaagagtgaaacaatcttatttaaggtttgaagggacccctctagctgctgttcaagatggattgggaggctgtcgttagtttctgttgagctgattccagttcatgcgggttggggacaaaagaagggaggtctgctggagggtacggcagtcatcaaaaaaggagatgataatcccctggattagggaggtcgtgatggtaaccataagtggttggattcaagatatgttttgaagatgaacatgacaggacttgctgatagactgaatgtatggtatgaggaagtaaagaagaatcaaaggtacttggtgtcacggattgaattgtgtccccccaaaatatgtgtcaacttggttaggccatgattcccagtattgtgtcattgttcaccatttttgtcatctgatgtgattttcctatgtgttgtaaatcctacctctatgatgttaatgaggcaggattaaaggcagttatgttaatgaggcaggactcagtctacaagattaggttgtgtcttaagccaatctcatttgagatataaaagagagaagtaagcagagaaacgtggggacctcagaccaccaagaaagcagccagagagcagagggcatcctttggacccggggtttctgcacagagaagctcctagacaaagggaagattgatgataaggacttttctccagagccaacagagaaagaaagtcttcccccttcccctggagctggtgccctgaatttggatgtctagcctcttagactatgagagaataaatctctgtttgttaaaaccatccacttgtagtatttctgttatgacagcactagctgactaagacacttgggttttcaccataaacaactggataatgtgacctttacttacagagggaagactatggaaggagcacatttatggaaggggtgttaaataaatttctttcctttggcaagttcagtttgagatgcatattacatatggaaggagtccctgggtggcgcaaacagttaagcgctcaactgctagctgaaaagttggcagttcgagcccacccagagacaccttggaagacagacctggcaatttgcttctgaaaggtcatagcactgcaagccctatgaaccggatccagtgccgttgagtcgattccaacttatagcgaccctataggacagagtaggactgccccatagagtttccagggagtacctggcggattcgaactgccgaccctttggttagcagccgcagcacttaactactatgtcaccagggtttccagaaagccctatagagcacagctatactctgctcacaggggtcaccatgagtcagaatcaacttgacaacagctaacaacattgcgtatggatgaggagatgtcaacaacgaggcagttagtactcaggaaggaggtctaacagacatgaatctgggattccacaacgcacactggtagtacttggagccacgggactgaatgagattacctgagggaggaacaactactgaaaggaaaaggacccaactgtgagccctgcgggagtcctgtacttggagttggaaagaggagccgccagtaaatgaaggaaagacagtgagataggaaagaagtagtcatcagtgccaaatacaaagagcagtcaggtaaaacagattttaaaactgaccactgaatttgacaatatgaaggtcatttgtggccagacaagagcagtttttgtggagtagactttctaatgtcctctctggtgggactaaagacagcatctgaaacaagggggcggagagaacaagtacaaagctttccagaaaatatcatgtggttcttaagctgtagtgtgcgtgagaggcacgtgaggcacatatgaacgtggcagattccaggccccacaccagagactcaagcacagtaggcctgggagtcagctgtggcccggaaatctaattttaacaagaactagggggaacatgttagaaggatggtctccaagtggaggtttatgtcatttctgaaggcccagtgcaacaaaggagtccttaggtggtgcaaatgcttaacacacttggctgctaaccaaaagtttggcggtttgagtccgctcagaggcacctccaaagaaagtcttcatgatctgcttctgaaaagtcacagtcactgaaaaccctagggagcacagttttattctgacacacaaggggtcaccatgagtcaggatcaacttgatggcaactaggaaaaaaaaatgcaacagaacaaaataaaccaacaacaagaaaccaatcaccagaccaaaccctttcctggaacaccacaatgtctactccactgaactgggccagggccttggcatctgtcaacatttatgtgttactagggagcaagattataaaaattaaaaaagatgtttgaaagagagcggatactactacccatgttggaaccagaaactcttctagaaaaacgtgggctgcctgtctctggaagatgcccttcatcacgcaagaggaccataagaacattttaaaatatctttggttttgtttctcatattcatccttaattagggtttccctcaagaaacgggctatttcccacatgggctgaggggattatgcatttattcactagcacctaaaccttgtctggattttattttctaaacctgaaagcactggtggatttgaagatttgagtgtgttgcctgcgaaactgtttttctgacttgcagacactgaacataaatcacgctagaggaaagaatggtccttctccgctgaggtgtttcaaagacggcctttctcctgcctctgggtgaggatgggtggtactctggatcaggccacagttacgtctatatttttatcataaaaatgtggaaacaaaagtaatggacccgatcttgatttttcctggctctcatgtagctgcaggctattatttttattaagtatttaaacgttttcagacttgtttggtgaagagaaacctagctctgtcctacagtattttctacaacaaaaaggcaacagaacgcatgcgttaccaccatggatgaccacgtcctcctcctcaacctggtctctctattaacatcaagtgatgtattacgatgggagaccgcggtgtcccctgccacgcacctcagaaaatataggataaaaaaattgctgtcatcaagtcaattctgactcagggagatcccatgagtgtcagagcagaactggctctgcagggttttcaatggctgatattttggaattagatcaccaggcctttcgtccatggttcctctgggtggactccaacctccaacctcttggttagcagtcgagcatgttaacagtttgcaccacccagggactccatacaaggaaggtactagcatggttttggaaaacgcagagaaagggctgatgaactgtagcataaaaccaaaaaaaaacagtgccgtcgagtcgattccgactcatagcgaccctacatgacagagtagaactgcctgatagactttccaaggagcgcctggcagattcaaactgccgaccctttgattagcagccgtagcacttaaccaccacgccaccagggtttcccgacatactccaataaaaataaactcagaagagcaagcgttttcatttttcttcagcgaagagactgatattaaatacaatgtgtttcttgacaccttctaccctcaactctgtagctggctatatgtggggaaattcgagattctcagaagtaccccaaaagtctgaagtatgaaatgattaccactcctctgattaaaaagtgcttttattggtggtaacccagagggctgatataacctggagtaaatagcactggtctctcctttgaaagacaattagaaaacacttttgccctgatagtgcagtctctctctgattcaggaaaaaagaaatttcttctctcttaaaggacaaaacaagttaaatatgtggtggaatgtggtctcaggagcctttgaatgctcccattggcaaatcctgcccccactacctctaatcatttgagtctatagttagtttcttacgttgccctccacactgagtaacaacaattcagggattctttttaaaatattcatttttatgattaggggcctggagaatcctcaggcaactgcttgcttcattacatcaggtgaaaaatccaagtttaattaaaataatgcaaaaccagctatttgcattgctgtgacaccaacatctgtaggatcaatgtaggcagcatgagagatgcctatgaaaaaaataatgacagcaggtgcacctggcatcttactttttaatttttttttttctctcaattatctcctctcaaagccttaagtggaaaccctggtggcatagtggttaagagctatggctgctaactaaaaggttggcattccttggaaaccctgtggggcagttctggtctgctgtatagggtcactatgagtcagaatcgacttgatggcaacgagtatagccttaagtgggtaacaccattcagtgagtgaactgtaaaacaattgtaatctgaagagacacctgggctgatggaagtgctttttcctgggggcaatcacacaaaacaggaactccattaaaacacacacacacacacacacacacacacacacacacacacacggtagcaactcagacagttcactaaccaggctgtaataatttaactatcttaattcttatttttcatgaaaataagccacattttgataagatggatggtaatttactatgatgaggttgttcatgagtcaaaaagaagatcaggaatttatgcaaatatttttgtgaatttgttctgagtatgcaaatgccatataattagttacacttctcatgcaaaattaaatttgctataataacaaatcacgcaagaatgaggctacttaactggaaaagaagcctcatttttatgactgaaaggctgcaaattgagggtaaactgcaggtgaatctaattgcagcctgcaatatttttattcaatcaggtcaaacaaaaccaaccacaacaaaaggtaagcggattccgctgtgtctctggccagctctagtatggatgcgagaatcacaaggagcagaagcagtggtgttttctgtttttggactaggccatttcagctttcattaaccacatagaagtctttagtctctcactatattggaaggactagaataacaaagccaaatttctgtttggaatatctctaatatctagttcctacttagtccctgcctgcgccaggctggagataacttggacttgcagcacgtttgtactccctggctcactctgcaaacataccccctattaagtgggctctggatctcctcttcccagtaaagttgtgtgcctgctgtgtagttgttgttgttagctgcttttcagttggctctcaagtcatggtgaccctatcaataatgagattggatggttgtgattcatagagttttcattggctgattttcagaagtgtcatcaggtctttcttcctagtttgtcttagtctagaagctcctcagaaacctgtttagcatcatagaaacacacaagcctccactgacagacgggtggtggctgccctggtccggaatcacacccaggtctttcatatcgaaggtgagcgttctaccgcttaaaggcctctgctcactcctgtctgctatgccactgccttcaagtcgattccaactcttagcaactgttatggattgaattgtgtccccccaaaatatcggtcaacttggctaggtcatgattcccttttatgattgtatgatcgtctgccattttatcatctgatgtgatttccctatgtgttgtaaatcctatcactatgatgtaatgagatagattagtggcagttatattgatgagatctacaagattagatagtgtcttaagccaacctctttttaggcataaaagagagaagtgagcagagagacctggggacctcacaccaccaagaaagcagcgccaggagcagagcacaacctttggatctgcggttcctgcgctgagattctcccaaaccaaagtaagactgatgacaaggaccttcctccagagtcaatggagagagaaagccttctctggagccttcgcctgaattcagacttccagcctactagcctgtgagagataaacttctctttgctgacgccatccatttgtggtatttctgttatagcagcgctagataactaagacagtgaccctatgggatggagtagatactccccacagagtttccaaggctgaaaatccttatagaagcagacagatctttctcctgagtgatgacggattcaaaccaccgacctttctgttagcagccaagtactttaaccactaggccacctgtctgctatacctgctgggaaataggggaattaggcctcttggcctgctaagctgtagcccacccccatgatctagggtggcaaaccattctgctttgcccaggaccttcattaaacaggcatagtccttctaacctacaaaaaacaccagtagttaagtcagcagacattttagcacccactatcaaataatatggatcatcagtggggcaatggttaagtcctcttggctgcaaaccaaaaggctggtggtttgaacccattcagcacctccacagaagaaaaggcctggggaactgcttccataaaggttacagcctaggaaacgatatggggcagttctaccgtcatatagggttgctatgagttggaaggagccctagtggcacaatggttaagtgcttggctgctaacagaaaggttggtggtttgaacccaccagatgctcagagggagaacttggtgatctgctagaaatcctataaggaagttctactctgtcctgtaggtcactatgagttgcaatcaattggatggcacacaacagcaacaacatgtatctgtaaagagatagcaggcatcaccacaggcctctgagaacgggacaaagcacagatgtaggaaaggctacctatagtaaattatgtggatgtattttacaacagatggagtagcattacaatcatgattgagatccagggacaggtaggattaatttagcctaagctagtaggaaaagaatttataaaaatcacattgtccgtaacgctttatttttttaatgcagtcataaaaagtatgtaattatcttttatgacataccaataaaggaagcacttctgtctccattttactaatgagaaatctgggttcagagagtttaagcagcacaatatttgagtgagcagttgacaagaaagtggtatttattttttaaatcatcagtatgaaagttgaaaaattcattttcatccccatagttttcactgccctacagaatatcctcttaaaatttgcatttgtttctcctgggactagattctgctcatagaatcaataaacccgaaacctaccgccattgattcctattcatagcaaccctacaggtcggggtacaactgccccatatggctttcaaggagcagctggcgaatttgaactgctggccttttggttagcagccatatctcttaaccactgtaccaccagggctcctatacaatcaatgggtcctaatgaaattacttgagcaccatggatttcagtttccttgtttgtaaaagaggagtggagccagatcagaggtttgcaaacttcagtgagaatcagaatcacctggagggcatggtaaaagacaaagtgctgggctgcaccccagggatggtgcgaatgtttaaggtgcatgtcggttcacccaaaggttgggggtttgagtccacccagagatgcctaggaacggaagacctggaagtctacttctgaaaaatcatccattgaaaaccctatggagtccagttctattccgacacacatggggtctccacgattcatggtctactcaaatgcacttggcttaggtctggggtgaggcctgaaaatttgcatttctaacaagtttccaggagacgatgatgctgctggaccagggaccccactttaaggaacagtggacttaagccactggtcatttctgttgttagctgtctttgagttggcgctcaattcatggtgaccccatgtgttacagagtacaactgctttatagtgttttcttaactgtaatcttcatggaagcggtttgccaggtttttcttctgcagagatgctgggtgagtttgaaacaacaacctttgggtaatcacaattgcaaaccacttgtaccacccaggctcctaggttatctctaagtcccctacaattctgactatggaaagaaaggcgtaattagtattattccgtctagaccagctgcaaataagtattcatttttctatccatcactctatgtatccattcaacaaacatttaataaacatttattacaagtatatcttcaaatattttccaattttgttaaaaatgggtaaccaaaccccactgccattgaattgattccaactcatagcaaccctataaggacatggtagaactgccccatagggtttccaaggctgtaactctttacggaagcagactgccacatctttctcccccagagtagccggtgggttcgaactgccaacgtttcagttagcagctgagaattttaaccactgcgccaccagggctccttaaaataagggaaaatgatttaataattaagaggtacatttatgggtatttgatggttttcttccaattccatttctgtgatcacgtgaaactgggaaaaatgaattaaatccaaagaagcattaacaattattaacatagagtcgggcacaaaggcagaactcatcaaatgttaaaatccatctatcacagttctaccttctcgtctcagcttttttattacagctgttagcaactctcctccttcagcattttgggcttttctcccttaccctttgttggaggagcgtatgaagtaagccagggtcaggggaggacaatgctgaggaagggagacgtcggggaaggaggaagatcacacacaaactatataaccaactcctaatgcactgagttccccaactgaaacaaaagccctgccttccacagtgtttatgggctctcattacagctaacaatacctctaggcacacctttccttcctgccacctcaccccttggcatatagttggtgggcagtttaggtggcaaaataagtggacagaaccagcacaactgtctggggactctgacagagaggtaaattcaacttaatcactgtcccaactgagactctgtggacacctggaaaaaaaaatgaaataaatcagtaacacctctaatgcttttccataaaattcaagcctttgactgagctcaacttcagtgtggaaagtgtttgtcccacccacggctgtcatcagcaatttcgtactatgcccaaagaaagtcctctgggagatggcacaaagtcaccgtatctgagataggtcctaagctgtacatcgaaatcttgatttccaggttcagcttgtgttcaactactagctgaaaggttggcagtccaaacccgtccagaggcgcctcagaagacaggcctggcgatctgcttctgaaaggttacagccttggaatccctacataaaccctatagagcagttttatactgcacacacggggttgtcatgagtctgaattgactccagggaagtaacaatgacagcttctaaaaacagccctcacatatagcctgtgaccccactaggtttccaaactacaaccaaattttgagatgaaaaattttaaaagaaggctggagtttgctaaatttaacttacccttccctgtgcaaatcagcatggcaggaggaggagcagaacaggcctcctgtgcaaacaggcttgccactctagggatggccccagggaacagcgaggaaactccctacttggagagtgctgaaggcctgaatggcattgagggttctctaaggcttatttgtgacagcaaaactgactcactgagagattcttttgaaaatatttacttggaattacacacaaaaaaatattttaaaggattctttcagaagtaggaaagtctgtttcattgccagctgagtcaggccaaacggccggaaagacttgtggaaaatatcagtggctctggtaggtcccctcgttatgttgcctggagatgtgcgccgagagagtcggagagtttcttccaaagactgtatgtgggcatcacaaagaagccctgattttagccaaataaaaggaatttgctgctgagtcacacaagagcatcagttgtaatcaaataagagaaaaagaaaatatcttaaagtacatgctgtatgtcacttttataatacattcattaattcattcaacacactctggtgtgtgcctgttacatgccagtactaggagctatgaatatatcacagcgatgcaaatagacaggggccccttccatcacggccatatttaatctttacaactacctggcaagtagggagccactgttatcatactttacaaatgagaaaactgggctttaaaatgttaatcactttcccaagtatacacagatggttagggacgttgctgttagttgcagtccagttggacctcatgtcaggggaccccatgtacaatgagatcagaccattatgctccatagggtatgtactggctgttttttggaactagatcaccaggcctttattcctactcttagtctggaagctccattgaaacctgttcagcatcatagcaacatgcaagcctccaccgacagacagatgtcggctatgcatgagttaccctggccgataatggaaccctgttctcccgtgtagagagtgacaattctaccaccgaaccaccactgcctacttggtgagtgaaagagccggagaaatttgaaccatgactttgtatctccaaagtgtgtgctctattcttttgggaaagatagaatcaaatgtaagataagatgaaaattagactactacagcttgtgaagaaagcctttgtacattcccctgaatgtctttatcagtctgaaaataaagcactcttctaaaagaaattggcattccttctgagtaccggacctttgtgattatctctcctgagagattttcatgcattataactaacttttattatttcaacccagaccttcccaaagcctttggactcctagttcatatagcacaactctatatccatttaagggtactgacttgctcaaacttattggtgggtgtatacaagggatatttgttgttttggagtacagcaaggccccatctttgggggaaatgcccctctcctactctatggcattctatccctgcctccaggatggcaccagtgacctgaatgaaagccagttagcacatgacatccccctggccacaccattggttcaaatctgggcagaaccctgacccaaccagagccaacgaggctttgctgggaccaatatatgaagggtatcttctgttctttgctagacttatggctatcagcttcagcgtgtgttatagatgttacaatcacctgaattcctcacacgttgccttttagcctcctgttggttgcaataatcatgcaaacggtgcaggaacgggcaacgtttcactctgtcgtacgaggggttgcggtaagttggagccgactcgacaacaactaacaacaacccactcttcaaaatgcctgaaatgttcactttcacctgatctcatctgtaaaaaagctactgacggtgtgttttctagtgggtaaaggtgaaactgttcaacggatgttactgcagacccagtaatgatgctgccatacctctcttctttaagtcaccctgcaggttggacatcctgctttagggatgaactgctcaggatttctggcagaacagcagctactaacgtttggtcaaagaacagggaagtctattgggaacgtggagtcttagatcctacctatgagacctattgcatcagaatctggactggcatctgataacaaattcccagttgatgccgatgctgctggcccatggaccacattctgagtagcaagggtttaggcttcagtgcttcctgatcctcagatacctgtttctgttgccaaccccaagccttctgaatcagaagctctaagaaagggacttgggtatttaccaggtaactcaggtgattctgttggtgggaataaatgtgaaatactgggaatctgacccctaatttggagttccaggttgtgctctcagctggttattctcaccctgctgaaattcgtggcttaacagatggaaacatgctagggcccctacttgggctattttccaccccacccaccccccttttttttttcttcctgaagacttgctactaaatgctgcatcctcagccatctgggattgttttttatcttctccctatattgttacgtgataaagtacctctggagtatttaaattccagttctaggcaaagataagtgaatagccacatcccagtggccttagtgtataatgctcttagcattttaaagacaaatgtaggttcttgaccctgtctgtcctgcaggttgtagacctaaagtgctgactgatctgaggaaatgcctttttttttgttgaggactcacaaaatgcaagaacagtgttagtaatgaaataaatgaatagaaatgataactctaggatctaggaaagcagcatttgctaaggttttctacatctttttaaaaattggtaaacttaggtaaacatatgctgcctaaaattcctaggggcctttgtaagtgcttagctatttttccttccttagcgttcaattctttgtaagacaaatgacatgttgaaactcaagggctctcctgtgaggagtaaaagtgaacatgtagaccagtgcttctcaatgggggcaattttgttcccctgaagagatttttggttgtcacagctggggcagaggcactgctggcatgcagtgggtagaggccaggatgctgttaaatagcttacaatgcataggtcagccccccatcatgaggaattatcacaccctaaatggcggtagtgctgaagttgagaaactctgatgtagaacaggtaccgttcacatcctgagagctcaatgatcatccatgtcccctccacctccccccttccagcccaaggttacccagttggtagaaccaggatttgaaacaacgttctacctccaaagctatcttctttccatcccaacacgcagtctcccattgcccactacggactgtaccctgttttccagagcagactacggtaatacctctgagttgaattttaggaggcattgtgaattccaaaggtccctggggggctcaaatggtttgcacttgactcctaaactaaaggatccccggtggtgcagtggttaagagctcaggctgctaaccaaaacgttggtcattcaaatccaccagttgctccttggaaaccctatgggggcagttacacgctgtcctattgggttgctatgagtaggaatcgacttgacggtaatgggtttggtttcgttgtatactaacctcaagattggtggttcgaacccagctagtggcatcatagaagaaaggtctgtgattacagccaagaaaaccctatggagctcactcatactctgtaacatatggggacaccatgagttggaatcaacttgattgcaatgggtttgtgtttggtttgtttttgtgaatcgcaaggagttccggggtgttacatggttaatgcacttggctactaactgaaaggttggagattcacttccacccagagacacactggaagaaaggcccggcaatctacttttgaagtatcagttattgaaagctctgtggagtacagttctactctgacacacacggggctgccatgagtcagaactaactcagtggcaactggcgacggtggtagattaaattgctaatcctgaactcagtctcaaacttcacagaatatctgctgtcttcataccagtttcaggtgaagaatagaggattgagagttgaggggagattggaagcataatatacaacttgacatagttggaaatttgtgtccatcttattttaaatagagcaacagagctcttatgagaatcaagatgcttacaacttaatatattttcagagaaaaaaattgagactcatctacagaggcagaactagaagtaaattaaaaaaaaaaaaaaattggaagtgactaagaatttctggcttttcctcacaccagacacagctcatggcatctctgtggtctgggcagtacttgacatgctttgaaggcaaaagtgttaaatatttaagagcattaagtaatgaacacataatagaaacacaggaaagtatcaaacactgtgaacttgattatgaagtgttagtaacaaggagagaaagcaactaccccatcgagcaaggatgacaggtcaatctacaaatggaaaaaatatatagctattgtttaaaaagtagactagatgcagtgtctcatgtttaatataaagcgaatctgcatttcaacctcagatgagcagtactgaaataccattaaatgctgggaactctcatggaaaaaaaaaaaaaaaaaacttgcaggaatcatagtaaaaaaaaaaaagaagaagaattttattcccctaggatgtccctaatcttaggacaaatgattaaacacaccctttatgtgaaaatgccctgtagttactatgaacctcttattataaagaaaaagaaagacaataaaaaggaatttgttttaaagaagcatttagagttttctttaactgtttccttcacccacattaatttttctctactaggctttccagagtggaaccaaattttccaccaaatagatgaagaagcatgggaaaggaaacacttggactgtcatggattcaattgtgttctcccaaaatatctgttaacttagctgagccatgagtcccagtattgtgtgattgtctaccattttatatgattttccctatgtactgtaaatcctatcgctatgatgaaatgagatggagtagtggcagttatattaatgagatatacaagattagatagtgtcttaagccaacctctttgagatacaataaggagaagtgagctgagagacagggggacctcataccaccaagaaagtagtgccgggagcacagtgtgtcctttggacctgaggttcctgtgctgagatgctcccagaccaaggcaagactgatgacaaggaccttcctccagagctgatggagggagaaagccttcccctggagtcggtgccctgaattcggacttctagcctattgggctgtgagagaataaacttccctttgttaaagccatccacttgtggtatttctgttatagcagcagtagatgactaaggcatgggctatttcaagatgaaggctaagctgacaggggctataaggatttggttttgccttcctctctagcctcaccaactacacccacctcactgtccacaggtccatatgtgagacaaggagaagccaggggacagctacaggacagtggaaaatggaggtggggcaagggaaagcactcaacaagaggaggcagtgccagacatgtctcaaatacttctgtttccaagttgatttagcaagagagacaaaatatagaaatgtaaccagagaagctccaggtggtgtttacctaccaaagacagtgtcaattttaataaagagtagccaagccttgaggacattggtggttcaatggtggattccttgccctctacgcgggacaccttggtttgattcctggcccatgcacctcatgtgcaagccaccacccatctgtcagtggacacttgatgctgaacaggttttagtggagtttccagactaagatggactaggaagaaggcctggttgtctgcttccaaaaatcagccagtgaaagccctatggatcacacaatttgttctgcaactgatcatggggattgcacagagccaggcaacgtattgttccattgtacataaggtcaccacaaggcagggctaacttgatggcagctaacaacagccaagccttaaagaagaaaaaaagagaataaatctgacaaaggtaggggtagggaggagataggcaacatatttggagagaaatgggagggaagaatgaggttagcaaatgggaagacataaaccgaccggaaccatcaaaatttaggttacatatgagggagaatacttgcacagcaacgcattaaatgataagtcattaatctaaagttgagagaaattatgtgcattttataactcttaaactgtctagaattttagaattactaaagaagacagagaccctggtggagcagtggttaagagcttggctgctaatcaaaacgtcggcagttcaaatccacccactgctccttggaaaccctctgggagcagttctactctgtcctacagagtcgctatgagtcagaatttactcgaaaagaagacaaaagacccctgtattccagatgtgcaggaatggacaggtcattcaaggccactgctcaatccctccccattaaatcacctgtgaagccttttaaaatacagattccgggaggcggggccgagatggcggaccaggtggacgctaccgcggatccctcttgcaacaaagactcggaaaaacaagtgaatcgatcacatacataacaatctacgaaccctgaacaacaaacacagatttagagacggagaacgaacaaatacggggaggcagcaattgttttcagagcctggagccagcgtaccagtcaggtgaccttcagcgcccgatttggggcagagcccaggggggtagacggcacaaacaaggggcccagccctggcccccgaactcattctgggagggggcccagccggttcacgtgggcggcgtggtggcacagccggtgggagaagtccccgggaggcagtgactggtcttggagcggggagagcagcgtcccagccgaggagccgtcccgctgggattttggcggggtgcgggcacggcataagcgcggggagcagctccacccccctaaactgaccccggggggggcccagccagttcgcgcgggcggcgtggccacgcggccggtgggggaggtccccggggggcagcgactggtcttggagcggagagagcagcgtcccagccgggacgcgtggtcgcggcgcaggcgcagggagctgctctgctcgcctgagctgaccccggggggggcccagccggttcacgaaggtggcgcggcgacgcggctggtgggacagggagtccccgggaggcagcaactgattttggagtcgggagtgcactgtcccagtaggggaaccttgacgttgggcgtggggctggcagtgaaggatctgaccgtgactgcagcgggccagaccccccgggggcaatctccacacagccagcacacataggcgatgcgccccgcggaaatctcagatataataatcattccaagcaagacaagcaactctggctatattctgaggtgctactctcctatctctctgatccctccccaacgctccccaggcggcttcattaacatccgaatagcctgagccagagggagaactctgatagggatctgactgcattttttttttagcggattttctggaaaaactagtttcccagtgatggctcggagacagcagtccatatcaaaccacataaagaagcagaccatgagagcttctccaaccccccaaacaaaagaatcaaaatctttcccaaatgaagatacaatcctggaattatcagatacagaatataaaaaactaatttacagaatgcttcaagacatcacaaatgaaataaggcaactgcataaaaagccaaggaacacactgataaaactgttgaagaactcaaaaagattattcaagaacatagtggaaaaattaataagttgcaagaatccatagagagacagcatgtagaaatccaaaagattaacaataaaattacagaattagacaacgcaataggaagtcagaggagcagactcgagcaattagaatgcagactgggacatctggaggaccagggaattaaaaccaacatagctgaaaaaaaatcagataaaagaatttaaaaaaatgaagaaaccctaagaatcatgtgggactctatcaagaaggataacttgcgggtgattggagtcccagaacagggaagggggacagaaaacacagagaaaatagttgaagaactcctgacacaaaacttccctgacatcatgaaagacgaaaggatatctatccaagatgctcatcgaaccccatttaagattgatccaaaaagaaaaacaccaagacatattatcatcaaacttgccaaaaccaaagataaacagaaaattttaaaagcagccagggagaaaagaaaggtttccttcaagggagaatcaataagaataagttcagactactcagcagaaaccatgcaggcaagaagggaatgggacgacatatacagagcactgaaggagaaaaactgccagccaaggatcatatatccagcaaaactctccctgaaatatgaaggcgaaattaagatatttacagataaacacaagtttagagaatttgcaaaaaccaaaccaaagctacaagaaatactaaaggatattgtttggtcagaaaaccaataatatcagataccagcacaatacaaggtcacaaaacagaacgtcctgatatcaactcaaatagggaaatcacaaaaacaaacaaattaagattaattaaaaaaaaaaatacacataacagggaatcatggaagtcaataggtaaaagatcacaataatcaaaaagagggactaaatacaggaggcattgaactgccagatggagagtgatacaaggcgatatagaacgatacaagttaggtttttacttagaaaaataggggtaaataataaggtaaccacaaaaaggtataacgactccatagctcaagataaaagccaagaaaaacgttaacgactcaactaacataaagtcaaacactataaaaatgaggatctcacaatttactaagaaaaacgtctcagcacaaaaaagtatgtggaaaaatgaaaacgccaacaacacacatgaaaaggcaacaaaatgacagcactaaaaacttatttatctataaaatacagattctgggtggttcttctgatttgtagtttggggacagatctcaagaatctgcattttaaaaaagttctcccaataacccagagcagtaacctttaatctgaggcgcttagactacagaaagtgtatttcagttattatttttgagatttgggaagaaacataaacaagaaaacaagtttttttttctttaccaaatgtaacaaaaattattttttgaaaaaggaagtgttttgttttgccttttgaaagtacacgttcgtggaaaaacatataagaaaatacctgctaacaaaaagaaaatagtttacaagtctcttaattataactttgttttgctgtataattttctgtatcatacaggataagtagcggctaacaattatcgagcatctactatgttccaggcatatatactaactcatttaatacatacatacacacacacacactaatgtggcatgtaccgttactcttattttttgggtgaataatctgtgaatatgtgcatgaaagtacatgagtgtgtatgtgtgtagttttgggttaaaaaatagacgatatcctaattgtccttgcctgatacagaatatttcacaccataattaatattcttgtactgtgcagattaaggcttttatcagttcttagactgaatataaatatttatactctttctcctttatcactgggaaggtagagtagttcaagacacctttgtggagaggggaaaagatgaatagcaaacaactgacagatttctctgaaagttttacattaatgattaaacagcatcatctgatgacttactcagcagctcacagacaataaaacatacctaaatctgtcaattagcattttcatcttctctcctgacagagcttaatggcatctgcaaaatgcaatttccaactcggagctctttgacatttgctatttcctccctcgttcctctcccgttgctcctgttatgactaagagcggcagcgcgttaggctcagcagtggcaaatgcgtcacctgcctttgaaaggaaagtaattactgtgtccttgctaaatcttggggaccacttgggtactgcttttcccctcaaatgcataaacagcctgacttggacctgttttaagtggctgaaccttagcaacagtggctgggctgcaggttgatgtcacctgaggtgaccattaagggtgtggaaagctgtcagacaagagtgcctttccagtaactacaatttgcctgtcaagggggcacgctgaagtcccacacacaaagtgacaaacaacgacagggaagataaggtattgactttcctgctcccttggttgagggccgcatcctggcgttggaggtggggctacttcttggatgggtttccagctggtgggagtggatgctatttacacaactgttaagacacattttgtactttcacacgcagctatgtttggctcacatacgtgtcaaccccctatttaccaccactctctctgaaaagtcaagaaagaagattctaggtggtaaacaagtatactttcagggaaactttagagtgacaccttggagttctgcatctaatgcagacatcttaattgtttctaagctgcagagtcaggtggtctggccaaacttgctcagtgtaacatttcatcttgaattattttttaatgtgcctttgcctccctgttgtaaagaaactgccttgctgccttgcaaacactatcaagcaccaattgaaacgctccattctaaatcaatacaataagcctccataaaccagaatgcaactaactgatgcactttattaaccagaatctggtttaattctccatttttagaagaaaatcaatgctttagaacatgcactcatttcagccaaaggaacaaagtccagtgcttttcctggagtatgtcagatcaatggcccagtctccatctagcttcttatgcagagagctggtttttagaatactcaccctgaggcagtgataacacagtcatcatacaaagatgtgattattgacacgattgtgctaaggactccaatattttaaaaaaagatctaaaagattgattttttttttttaattttggggttaatgacgctataaacagaaatttatattcatatgtacacttttggcctctagcactggagtaaaaatttcaagtgcttcttctgctctatttgttttacctctggggtgatctgtaggctttctctcacttcacagatgcttgatccaaggtgggaggtaaatgacttactcagagggagatagcaggtcaatacctagtatgggggtagactgtaagctgtgggctcaccatcccgtgagcaaatcgatcactagagaggtgaaccacttgacatcactagtctaagcttgtctctttgaggaagaattctggttttaaaaatggagtttgaattatccagcaataagatgcattacgggctctttttggaataattatgaaagtaaaacttgccgttgggtctctgaattttcctttcatgttcactaacagaatgaacacaaaagcgctgcaaactaagtcttcccagagttagttcaaaaagtgcgatttctattattctgactagcagctcccagagttttataggtgacaggtggttaattcattacagagttgctctaggcaaaaaaaggcgagaatgataatgtttagatccacttattttttcttttttcagataaaaaactggagtcctgaagtctgcagaggtctgtggttagcacacggtacattggattagcacagggtcatggagtccctcaggccagagtttgaagctcagcacaaattatcaatgaactttcccagtgaacagaatgctcttgccttcctccagtgactaggagaagccagggtcatcaggaactcaacagatggtgtggaaaagtcaagtcacgcaaaaacactaaatggtcattcctttctacaactactattgatattggtcagactccatcaccttccctggtagaggaacaaccattgagtcagtagtaaagttgggaacggtagctatctagcagcttagtattttcccccatggctttccataaccatgcctcagtgaatgctgatagtcagaccgcactgctaaagaaataccatgctacaatattgtcctattagatgaaactactcaaataactttgcttccatttttatgctacttgctgctcacctacatggtgaagactgcattgggtactatgggttaaagtctggctctgcaactcactggttgtttgatcttggacaagtctctcagcctctttgtgcctcagttttctcatctgtaaaacggtgataataataatgatgatttcttcctaatagagacttaagaggattaaacaaattcgtatttgtaaagttggcagtgtgtaagtgtgctagccatttctcttcacaactgaaccagcacagcaggcgctcatggtgatggtggttaaaagtagctgcaatggggggcaggtcatgtgctaggtcccaggttgggcaaaccatgcaaactatcttaataaattggatcttcccaggaagtaggtattactccatccattttataagtgatggttcatgagagttaaataacctgtctgatgttacacaggtggcaagtagcagagtgaagattcaagcccatgactctctagctcccaagtccatgctctttccatcacttcacactgcctttcatcatttctcaatgtttgcacataaaaataatctccttcaatcgagtgcatgtagatctggctttgttatcaagctgttacccagtcataaatgtctccttcaaaaaggcagctgcatgtcttagaggtggaatagcaggggatacgaattgaagatgtagagtaccagatgcctcaccaagaaatcattagcaaaattccagagttagggtccactcacactagtgcagtgctgaaagcagtttactgatattagatttttcatcctgataagagggataagctcctttaacccccgctgagctgggtctctgctgtgatttgaagatgtatagaaagccaaacacattttcatttacttgaggtctctcactaactcctttatggcaaactcctgctgagtgctaattatgtgacccaccacctgtctgtcagtttgtcacaccgaggtggcttgcacgttgttatgatgctggaagctatgccaccagtatttcacataccagcagggtattaatagtgggtgctctaggtagaaggaagaccctttttctctcctttaattggataaatgtgtgcaagggaagactatggctattataattcatgtccagagagagccagaagtcagttctggtgtttggggactgggtacagcaccaaaagaaaatcagttacacaaagccccttaatcctgtatatattttacctgcactgtaaatccacttcattttaaatctgtgacctgttcaataaaaaatgtgtaaaggaaccacagagaagtaacataaaaaaatttagcctaatgctatattgattgtgtatgcatatctttacttttgcatattctgtgttataaaaaaatgcccaataaaagctgaatttaaataattatgcacttttcacactactattgtaatcaatggcttattatgaaaattattgccatctttaagaattactttagtaagtgaattagacctgatattttattttctattctagttccaaacattgattttctatgctaatcagagtacgagaatcgggatataaattttcctaaagcaaaatgaatggctagtcaggcttcaagtttgatttttcacagaatatttggtgtttttccacggatgttgatcttgagaggacatagctgattattatagatgccactaccgaagtaggtagaaatttctccattttaccaaatctcaactatctgttactcaaagaataaagagacataaaccttcgaccagcaaagagggttggagaaccacatctacatcttctgtccagtaagacacagccattatttcttagagcaagaaaaaagttagctactatttacttggtcttgagtatgcctggcattaaactcaataaagcataacagttttctctagtccttatagttatttggctaggtagttatcactattattattattcttacagataacaggctcagatggagaatgtgatttgcgttctatcaaacagctagtaagtggttgagttgggaattgaacttatctgctggttcaaaaggctatgcttgtttcattcctttaactccgcctaacacaaacagtttaagtgaacatgttttaacacaagaattgagcttcatgaggattctgccctttagtaggaatgtagtggcaaagtttcaaacgacagtgaatgtcctcacttggcttttacaccactgtggattgtagagggcaatgcttaagcttacgggctgaagatgagttagaagcaaagacacaaagactatttagacacgtattgatggaatcagtgagtcgaaggcaaagggagcaccaaattcagagtcacaagatgatacgtctaattccaactcagccaataataaactaggaggttttgaataagttttccccatcactctgggcctcacacatctcatttatggaatgaagggctcctctttatggtaacaacttctcttttgctccaagggatacctgaagaggttaattcatccctaaaactccaggcacatccctaccatgtctcaccattaaagacgccaccagtcgctgtcaaatcgactctgactcatggcgaccccacaggtgtcagcgtagaactgtgctccatagggttttcaatgactgatttttcagaagtagatcaccaggcctttcttctgaggtgcctctgggtggactggaacctccaacctttcggatagcagctgatcacttaactgtttgcaccacccaggaattcaaaaagcacagtgggcagtcattaaacattgccacctgatttgccccgatggccctaggtgtctatttgagagatataagttatattttaaaagcaaataccaaacaactaaaattgtcagatcctgcagaggttcatgtcatacacctgcaaacttcctgtgggtataactagaactcaggcctgttttctcttcacatgaacaccccactcctctgctgaccccagcctccttccttttatcgtcatcaaggagcaatacaaaggggtcaatgtggtggacagtgtttctttcccacatggcatagagagttcacactcagtgtacctggccctcaaacctagctctgcccttgtctagatgtagtccttgaacttcacctctacttctttggctttagatttcttgagatgtctagtgttcttcacgctccaaattcagggcaacataccagttggtttaacacacaggcttatggaagaaataactagtaaactcactctgcattaatgctgtgctaaatacctgtgtctgaagaccaaacacgactgggcagcattttgtcctgttatacttaagaccaccatgagtcagagctgactcgacggcaactaacaagaactacacgtatctctgttacaggaatgagtacaaatcagacagatgtagagagaatcttcctcatataccaataattatcctccttggatagggtggaccattcttatgatgaattccatgttatagcaaaaaacgcatatgcttaaacaattttactccccacgttagtaacttattccctggactataaacactatgatgtgtctacacttcaatgtttaaacgtgttttatgctatcaaatacatgtgtttgaatcaaatgttcgagaagtctaggctttactatttgcaagtcacagtaaaagtccttgcaatattcaaagtctaggattcaagaaaaaactgaattagcatggggttattaaattttttacttgttcaaataaaatttctaaatgtaataatttggttaagaaaaaataccgtaatttatcatcaaaggcatttggtttgtaatgctatgaattttggagtgaagcactgcacaaagtgacagcaacatgccattctctaaggctaccaataaatgttcaaagttgggggatcttataaaaatgcaccagttcttattaatgaattctcatggaaaaaatgcacacacgtggttctttcatcccatactagctcattggccatggattaaactacgtggccatttgcggcctgaaaagaccttaactcacatattcgcgacctgactaatgcatctgtatttacagtgcaccttgcattctgggagaataaatcctattgcactgtcattgaatccatctgtttcatccttacagcactctagcacagattcaaaaaaccaagtatcaggttgctgtttgataggtaagaaaactgagatataactgttatgctcaagtcaccaggcttgtaagggacaccgttaagactaaccaaaaccccaaagtcattgctactgagtagattccaactcatagtgacccacgtgtttcacagaactgctccatagggtttcaaggttgtgactttttggaagcagattgccaggccgggcctgtcttctgaggtgtctctgggtaggtttgaaccaccaaccttttggttagtagccgatcacttaaccatttgtaccacctagggactcctcctaccaagactagaacctaagacaactcaaatattccctgttttagtctaaaaagctttatcctctctaagacatggttctatgacatatatgctttctttaaactacaaggccacttctccctttccgcgtgatcctgctctcattatatgcagggaagcactgaaatcactactataatctgaattcttgagaatttgaccctccatctcttttgtttctctctcttccctcaagttcctccagcaacagataaaaacgagaagttgtgtatatatttttaaaatgaatatgccagaagagagaatcctctagaaataaaggagtttatggaacttttcctcttttgatctttaaaaagaacacaaagctaagtctttggaaaaaaaaaaaaaaacagttctgtgaaacaggtcccttgggctgagaatccatgcccctgagctatttttaataaatcatgtaaacagtgggttactttggtctttgaaagcctggactttagaatgaggaggaaaaaaaaggaattcggtgactttcgacatttgagaatctttatgtgtgcgaaaggggaaccatcttattgaacaagtgggctggactgctaggaacagagatggggtaaccatattttaaccaaacatcataatatgctcaattgtagccattaatttaattcctaccaagccagatggccttctccttgttaccacttggagaaaataattaagaaaatctagagccagagtgaaacagataggctgtcttttgacatggtgattcttccgtttgtaattagcgactgataaagtgctatgcctgctaactgtggggaaggatagccagttatttaagacactaatcccactgtatttttaaattgcttttcactgatatttgccctttctgtcccatcctgtaagtaggccatacattttttagaaaacaaacgaacattagtgtatatcagctactattctagaaaccttggtgtggtctttggttttaaatgtacagattcagagataaatccagggtctactgctgacaacgatctggttagtttattttcctggtgctagaaagtcaacccttcacccccatgctctgtataccttctatgcactgaactccccaaaatactccctggccagagaattattatgttttttaattatactggttacacagatcacaagaatggcttttagttaaacaaaaggaagcatttaagaattactcaaattatagtaataacaagttattattcaaaactatctggagttgactagcaattttttttttttgtagctggaagtaaatgcttttctgtttaaattgtgaataataaattctagccaccatattaggaatgaaaagcagctcttgctttcttcatcttgaaggatgttcaaaggactcatttctccacaaaagtcctttcctctggccaaactaaagatctaccaaaagaactcatggcatttcaaacattagaagtctagctttcatcttttctttctccttctctctactaacccacaaatatttattaggaccttattatgcactggagccctgttggcgcagtggttaagagctatgcctgctaattaaaaggtcagcagttcaaatccaccaactactccttggaaatcctatgggggggttctactctgtcctacagggttgctatgagtcagaatcaactcgacagcagtgggttttgttttgtttcttaattatgcattaagttgaatcttatgtaagtgctaaaattcaacggtttttggcctataaaaatgactctgtacatcccttgagagagtgggggacaaaaaggaaacaagtaagacataatacctgcctcaaagatctttatactctagctgacaagccaagaaggtagtaatgaataatccatagcgatagactatgccattatttgtgtgacgttaaaaaaaatctgctttagattctgattcatggtgaccctatgtgttacagagcagaacttcccatagggttttcttgactgtaatcttaatggatgcaaagtgccaggcctttcttaaaggcactgctgggtgggtttggcctgccagcctttaggttagtcgttgagtacaaactgtttgtgccaccttggcaacacttcctagtgctggggtagacagtggtttctttgtggaaggaaggggttcatatggattttaaaagaatatttagaaaaagagaagacattccagcacctaagcattccatttctcatgccttattgtaccgcctattctcttccctatttcagcagccagctcacctcctcaggggcactcctgcttccagactgcccgaggaacattgctaacacacctttacctagatactattccaagtcacttgctttatccaaaccactgtgggtgtccacaaatcttcccacggagtttgatactattcatctgtggtctttattgatcattgtcaatttcattaatccccatccactcctgactgagattactaagaccattgaatcaaatacatttctcatggtcgcctactcgcacgctgatttgctccatggaagaagcgtttattagcgtctctctccgtatagttgtaaaagaacataggaaatgacaacagggtccggctcagcacctatttctgacttgtcaccctgcagtgggcaatttttctgtttgttttttttttcctataaccacacacctgaaggatatgactcacacccctccctaacaataactcctttcagaaatgcatctgaggagggtggagcatggcggggctcgctttcctagaggaatatagcaggtgttccagtaagaactccccaaaaaatcaaaccattgccattgagttgattttgactcatagtgaccctacaggacaaactataactgccccatagggtttccaagaagcggcttgtggatttaaactgctgaccttttggttagaagccaaatgcttaaccactgtgccaccaggacctcttccggtgagaacagatgtaggtaattcaaaaaagaccctcagatgaattggctatccctctccaacccccgtccctcagatgcacaccattgaaggttatcacttttcaggacatacacatttcttcttgacattggactcagtaagtgtcatgctaacttctcttaacaacctgctgtcgatcttccatccaaaaatattcatctaaataattctaaagttaactatacttcccattatttgcattcaaatgtccttccttaacttctcagccgttaagtaacacagcccaccccaccacgtgaccacactaggttataattttgtctcttcacctgtgtgtctcaccaaccgcactgtgagcttcggaggttgaggacagtcttttcgtcttcgcattcccagcacctgggacatacctagcagcaggttgaaccctatggaattgccatttttgttgcttaaatatggttgcctctcaaccatttcagaaggttcaatcttaaaattgtgagcaatgattgatgaacgtcctgaacatacctctctaaacttcagagaaaacaaaatggaaaggaaatggtgaggggaaggaaactaacatttactgagatttttattcagcaggtcttaggggcctgggaatctgcatttgtactactctcccaggtgattcctaggcggttgatccactccgtggactacaacatgacaaactgctcttagggacacacagggagtagaatacacttcttgtcaactaggagaacaaaagaaaggcataaaacaagcctgtcttccatctcctcatttccatgcccatcttcctcatcccatctagactctgggctgcgcaagccagaatcagagcagcctgaagggctatggatgcttgtgctcctcaggcattttacttttttccaaagagattttgtccttagaacaagtatctagcagctttgtgacggctgctcaccaatgtcactcccgccacctgtctacacggttcacttgcagagtggggtcatttagctcctgcatccccaaacgcgcctcttttaggaaaggaccctctaatgtgctcagagaccagagcaccccgaggccactccgttctttgcacaggtgctcccaaaaccgcagaggactctcaacagctttcacatgttgtaattaatgagtgcccacgcttggcaggtgaggagaagctcaccagagtggttcccaaaggatagtaccatcagggcagtggggcacaggctggaagatgaggccccaaaatagattggccaaagagactgtgtagagagggctgtaggctcaccacattactccttgattacatctctgggggatatgctaaagctgaaggtttattcaatgaaaatcagagacacaagtcctcggaagcaacacatcacagaagcaggtgtgggaattgatggacatgctgtattaatgaccacactcattacaatttgcacagtgtattgaacgaggcattattcatgagggacggtacattaaacgtatcatgtaatggcattgaacacatcatgtaatgtgatgtactgtcaacatgccattcattgtgtgtatttgcctttatttccagactttatggctaccctgaagaattgaaaaaaaaaaaatggtatgtcttgtttagatacacacatgcaactaagaaaaactttagtagcagaaaatgacaactataatatacctgcaaagggaaatcacatgtatccagccctgtaaaaagaaagaaaaatacaacaaacacacacacacacctgctttaagctaaggaataatgcagaggccaaaattttaatggaactgtaatgagaatgtaattagaaaaaaaaaaaaataagaaattcctacatccaaaatgctccttagaagtgaggatggtgagacttcgtgtcacttactttgaacatgttgttaggaggggccagtctctggacaaggacacatcatgcttggtaaagaagacagtcagcgtaaaagaggaaaccctcaacagggtagataacacagtggctgtaacaatcggctcaaacatagcaacaattgtggggatgccactggaccggacagtgtttcattctgttgtacataggtttgctatgagttgtaaccaactcaacggcacctaacaacaacaacaactacaaaatatgtgttggaatcctcacccctatacctgtggatggagtagagttttttttttgttgtttgttatggtaatgagcccatatcagcatggtgtgtgtcctaaatctaaccacttttgagttataaagagcaacagacaaacgagcacaaacaggaggaagccgggtgttatgttaaggtcaccaaggaactgaggaacactggggcttcagaagctgagacaagggacttcctctagagctgacagacagccttctcctatagcaggtcccttaaatccagacttctagcctcctaaactgtaagaaaataaagttctgttctttaaatctacccacttgttatatttctgttatagcagcactagggaactaagatatcacccttgaaaaattttatttctgaaaattggaatgaggcaaccaaaatctgactttaattaattcatccaataaatatttattgaaagccaactctgtcccaggtattatcacaggtattatgcaaatacctataagacataataagcctctgcactcatggatcttaaattctactgacagagttggtccccaaaacacacaagtatataagtaaaaaaaataagtatataacctaaatttatgtagtcacaagtagcagagtaaatgtttaacaaccagaattggctggggcttgagagggcagccttgttttgtagctttgtttaattttccatagtgtaaatactcccaccctggacaatttccagctgccaacatgtcactagctgaggagttaggaagatatgggcacaattagctctcagagctggtacgagccagcaccagcacatgcctggaagtgacatgaagaaacaaagcaaggtaaggagacagagactgcaggaaatggtggcccttttaggcaagtggtcagaatggcttttgaagagtgatgttggaacagagatctgaatgaagagaggaaggaccatgaaaagataggggcagagccctgggggtggggtgtaggtgggcctactagaagatggctgatggaaggtaagcaaggagtcaaagatgatctcaaagatgactcttaggcttagctactttgaatgatagtgccattaactgagatgaagaagaccaaggcaacagcaggtgctgagggaaaatcccgaattctgttttgctcattttaggttagagttattgacatccaagtggagatgtcaagtaggcagcagaatataaaagtctatagctcaggggagaggtcaggactgaagacataaatctggaaatcacccaaatattgatgattttagtgacatggctttgaagtgtcatttgaaaaccactgccttagtgaataatgaaagaaattcagcctttaaaaagctgctgtggagaagacaaccttttacaggaatgtagaccaagactatctcccctattaaactcctcaatttcctgaagctacagctattaaggaatactccatttccagactggtcctgttaaaatccatactattacttactagcaaattagtaaagattagctacccacgaacttagagaactagatattttgatggcaacatgatggagcaatggttctcagccccggttatacattataatcacctggggagctttgaaaaataccaacacgtgcagcccacccctacagattctgatttaattgttgtacattggtaaaaggtacagatttttttaaagcagggaaactggataaggggcaggaaaaggcagagatggaaccaaagaacttaaggtctcaataatgccgaagaagaacagtggggatacttgccaacgtcatctggagagaagaggttgtggtctgagagttggatgatatcactacggttttgaaggtggtcagaatgtgacacaggcattgcgatagagtagaggaaagatcactggggataaaggaagtgaagtaaatgagaagccagtgtgttggcaaatcctcaagagattcacagtgtgaggcgtgatgacaagagctgagatggagagatagccagggccagaaccaaggagccaaggtcttcaacaaatgaggagacaagagcagcaggggtagatgatagcaacaagaggcggcgggagatgtttactcagaatgaaattagcttgaaaggagtaggcattcttcatgaagaagggataaaatggtccaaatgtggtagtggtgagcagggacaataccacctccaaatctaagccatgagtttccaggaacatggagagatgtgttagcaatctctactggagagggctgagaggatgcaaagtcctcagaatatgatccagatttagtgaaggccaaggagtctctggttggcacaaacagttaggtgcttggctacgaacagaaagttcgttaccttggaagttacctcagaaggaaggtaccttggaagaaaggcctggtgatgtactgtgaaaggtcacagacgttgaaagccctatggaaccgttctactgtgacacacatggggtcaccgtgagttggaacttactcaatggtgactttttttttttttttttccttttaataggtggagtgttctgagaagaggctgagaaaaggagagtttgctgatgacacactgtgagttcgagagggtttttagaagaccggatgggatgagaaatcagatcagatcagggtttgttgagctgtaagattaagaattcaagtatgaacgaatgcttacatttctggagttgacgagggcaaaccatgttagaaaagataggactgacctgatagcttcctgtataagagttcttaggtgataactcttttgataattctacttaacaacaaggcactttttgagccagctgcccctcatagagtgtgtgatgataaggcagccccctcaggtagcactgggtgacatgaccatcagtctgggttgtggcttcatgcaacacagtgattagagccactgacagcaaggtaacagggaggtaactttccagtagaatgggcacatgttactgagtaacaaacctggttaataaaactcaattacagatttcccatgataagacttgagtcactttatcaaatatgagattgggcaaattcatgtgacctctgaaaatacaatttgctttcttaggctcatccaggactgtatgttgtggtagcctggtcattgctgtggactttgcccctaaataactgtattttctgagccaaagagtgattgtcacacgtgaagtaaaaaaatcatgttagttcctgatttttgaaatcatatatgtttaaaaaaaatataaaggtgtcttagttatctagtgctgttataacagaaataccacaactggatgactctaacgaacagaagtttattctctcacagtatagtaggctacaagtccgaattcagggtgccaccttcagggaaagcctttctttctccgttggctccagaggaagttctttgtcattaatctttccctggctgagaagcttctcagtgcagggaccctgggtccaaaggatgcactatgcttccagcgcttctttcttagtggtgtgaggttcccctgtgtctctgctcgcttttctcttttatatctcaaaagagattggcttaagacacaacatgatcttgtagattgagtcctcctcattcacataactgccgataatcccgcctcattaacatcagagaggtgggatttacaacacataggaaaatcacattaggtgacaaaatggtggacgatcacactgagaatcgtggactagccaggttgacacaggtttttggggggacacaactcaatctataacaaaagctatatataataagaaggctggaggaaaacatacctaaatgcatggtgttatggataacaaaaattcctctcattatcttttttgatgtttttctcagatttctactatgagctcatactactttaaaaattagattataaagttacttataaagtataagggttgtactcaaaccaaacccattgccattgagtcgattctgactcacagcaaccctatacagtggcatgcaagacaaaatttgcactgtcttgaatatgtccatgttgtttgactgctatcccctttctttaattttggaggccttctgacggttggagtccctgggcacacaaacaattaaagactcagctgctaaccaaaagattggaggtttgagtctacccagaggtgcccgaaaagaaaggcccagtgatctatttccaaaaaatcagccattaaaagccacacagagcacagttctaccgacacacatggtgtcaccataaatcagagtcaactcgatggcaactggttaggtttgttttttggtctggtgatgtatttgtactggacccctttgagggaattttccaactcttttgttgttgttagttgccactgagtcggcccggctcatggtcaccccatgtgttacagagtagaactgctccatacggttttgttggctataatcttcatggaaacatatctccagagcttccttccacagagctggtcagtggatttgaattgccaaccttttggttagcagccgatcacaaaccacttgcaccacccaggctcttcacccaacttttagcaactagctttctctgagaactgcctcctcacccacaaagctaggctcatggcagctgtatttcaacatttcggctctgctctctgaccaaatctgtcggaccaagagaggacagattatttcttttaataattttaatttgtgacagagattacagttgggtttggaatggtttctcgaaccaagatgacaaactttggcctatgtggtagccaccttctgtgatgggcaaaatgacacagagaaaactgtcctgcagtaagagaaggatgaaatctagcacacagagagaaaatggtgtgaggcagggatagggtatcatctaagagcatccttatttggaatttcttaaccccactgccattgagtcggtttcaactgacaggtactctgtaaaacagagcagaactgccccgtggggtttccaaggatgtaatctttatggaagtagactgccacatcattctccctgcagatcagctagtggatttgaatcgatgaccttttggttagcaggagagagctgtaaccactgtgccaccagagctccctctgaacttcttgtacatgtgcaattatcccagtgtgcttaaaccacttattctgagcgcattcctcaaactttagcttactttaaaccagaagaatcgggaccaggataccttttctgtcttgtatcttttctcttttctattactggtaattaaaaatttgttctaaagttcaaataaatgacttttagaatataaccgatcagtaattatagattataatctataaattatagatttatagctaatctataaaaaaggttttaatattgtttagaaattattccactattataaacctctatccatttattttattcatctatccactgtgatggaaaggtccctggatggtttaatcaatttatggtcagctgctaatctcaaggttggtggttcgaacccacccaatagcatcgcagaagaaaggactggagatctgctcccatacagccaagaaaaccctatggagcacagttctactctgtaagacatggagtcgccgagagtcagaatggaatcagtgacaataggcatggtatggtatagtgtgacaaaatgcaaaatctgcatctcattgttttgggtgggatacctcttaggtattatgaagaacaatgcttcagtagtgctgtgccaatctcatcacttccctccatccccaaacagccccaccaccactggcatcactagagttggtgcaaactcatggtgtcagcccccatgctaatgaccacaatattgtagtgaaaaaaccagaaaatttaacaaaatagttactatttttcatatcagcaatgagaacagcagcacgtgcttgtagcacgtacagatgaaaccacatgatttgaagcccattgtaattgggtaataatgacagctctgaccggtgcacattagaaggttcaaaaagtcaattggcatagacttgtagccttgtaggtatattgatacatgtaagttgggcttttgaaacagtttttgttatagctaactacagtgatatttttataaaacataataaatttctgctgaaacactgcgtaaaaattttatagacagtcattttggtgtcacccctcctgacagtgtcccctggtgtggtctataccccccggccacacccccagggacaccaccgcccaccattgccactgcgttaccactaatccacaagccaggcggcaatttacatgctttgatcacaagaaatacaggctgcaagctaagactagggagccctggtggcacagtggttaaggcacttggctgcttaccaaaaggtgggcggttcaaacctgccagctgctccgagagagtaagatgcgtcagtctgttcctgtaacaactgacagcctcggaaaccatacagggcagttctgctctgtccttcctatggggttgctatgagtcagaattgacttgaccacaagggtttgggttgtttctggaagctaagcctggttcaaagcaaatgaacttcttcctctctctgactcctgcgacccccatgctataaaaaagcaatgcagacaacattttcctgcctacggttaatgaatgaaagacagttcaatgtgtctggcagaggtgatttatcttatcaggactgtagcctctgcaccactgggcaggatttacaagacaggagaagccacagaacaaagaagagctgaagtttagaaaattcccaaagataagcaagcaaataagcaaaaataagtaaataccaaaatacttcttgttagaagccttccaatactggtgtcttctctcttgtgtggagcaatataagaaatgctctcccaaaataacttgagcacatttttttttctatttattttgagcacacgaccttctctgcctctcaacattctgaaactgtcatgtcaattctttccctttcactgctttctctccttccacagaaaagaacaaaatattttaattatttatatgtgataaatgcaaaccgtggaatcccctattctgtagcctttggtttgggggaattttttttgttttgataaaagaagtaaagatataacaatagcaacagcgtggtcaagaggtttgctttttccctatcactctggctgcccttgaagaccagagtttgcagttaacagatgggacagtgtgttataagaggcgcccctggcccctgccctcttttttttgtttttaatttattgtgctttaagtgaaagttcacaaatctggccagtctctcatgcaaaaacttacatacaccttgctctgtactcctagctgctctcctcctgctctcagcacactcctcctctccaccttgtgctgcccatgaccattcaaccagctcttgtccccctctgccttctcatctcacctccagacaggagctgcccacgtagtctcgtgtcgacttgagccaagaagctcactcctcacccatatcattttctgagttatagtccagtccaatccctatttggacacttagctttgggaatgattcctgtcttaggctaacagatggtccggggaccatgacctccagagtccttctagtctcaggcagaccattaagtctggtcttttgatgagaatttgaggtctgcatcccacttttctgctctatccgggattctctgttgtgttcccttctcaggacagtcatcggtggtagccaccccagccccctttctgctctgtagagtagcatccacctggatcgccctcagccaccccttttcctaatgtcctcacagtgccctgagttcccggataaagggccaaggctccgctccacaccagaatacccagagctccctccatagagtaaacacaataaagtagattccaccaagagagaaagtaacctattcagcttcctcatttgtcacactgtggtgcctttcatgttgatgtgatgttggaagctatgccactggtatttcaaatactagtagggtcactcatggtggacaggttttaaaggagcttccaggctaagacagactaggaataaaggcctggtaacctacttccaaaaattagaaaatgaaactactacagattacaacagaatattgtcctatacagtgctggcagatgaacatcccagactggaatgcactcaaaatacacagtggccacgacaatggactcaatcataccaacaatcatgaagatggtgcaggactggacaacacttaattctgttaaacatacggttgccatgagttagagctgacttgatggcaactaataacaacaaaatgagaataaatgactttaaaaatccttcctgtccctaaactgtaaatcgttgctattagcttgtcgtcgttcttttttgtttgttcgttgtttgtttatactgtaaactggattctcccacttgaaaaccactaagttatttgagtgcccagagattctcttggtaggatctctcaaagaatacaaagtaataagatgtccagagtggcctgttggctttatattttaagaacctcttgaatcagttcagttcatgtttttccagctccttcataatatcttgctgtatcttgccctcaactcttgcttggtctatattaacaagcctcctctccaaattccatttgtccagctgaaccatttcttacctgttctcagcaaccagagtgagcttagaacaataacaaaagccccaaacaaacaaaaaagaaagcaactttttattttgaaataatttcacccttataagaagttgcaaaattagaacagagagttccttgtactctttatccagcttctccgaaggtaacatttcacgtaatggtaaatatgctgctgttaattggctctaactcccatggcgaccttacgtataacagaaaacatgacccatcttcacgatggctgataagtttgagtctactgttgcggttatcgtgccaatccatctcatggagggtttcccttgttttcactgaccctctacttaccaaccatgatgtccttgtctagcagctggtctttctttttttttttttaataacttttattaagcttcaagtgaacgtttacaaatccaatcagtctgtcacatataagtttacatacatctcactccctactcccacttgctctccccctcttgagtcagccctttcagtctctcctttcttgacaattttgccggcttccctctctctctatcctcccatcccccctccagacaagagttgccaacacaatctcaagtgtccacctgatataattagctcactcttcatcagcgtctctcttccacccgctgaccagtccctttcatttctgatgagttgtcttcggggatggttcctgtcctgtgtcaacagaaggtctggggagcatggccgccgggattcctccagtctcagtcagaccattaagtttggtctttttatgagaatttggggtctgtatcccactgatctcctgctccctcaggggtcctctgctgtgctccctgtcagggcagtcatcgattgtggccgggcaccaactagttcttctcgtctcaggatgatgtaggtctctggttcatgtggccctttcagctggtctttcttgatgacatgcccaaagtaaaccagccacggtcttgtcatccttgcttctaagcagcattgttgttgtatttttttctaagactggttttgttcttctagcagtctgccatatatattcagtattcttcaccaacgccacagcttggatgtatcaattcctcttctgtcttcctttttcattgtccagcttttgcatgtataggaaccaatccaggaaatggatgctggtacaacacttaatgaaactcaaagcaatttttcaaaaatgcaaacccgatcatgctagcccccctcctcactttgctgaaacatgttactggcttcctattgtttttataataaggaccaaaatccttaacctagtccgtaagaaatgtgaccatcatgctagtttggccaggacagtcctggttcccatctgtgctaacaaaatgtcacgtttaacattttagcattctcaaagtgtggtggtttggatgataaattagggggtcacccttccaacgatctatgtactgtttggccctgtctacatacacctccagcttcattttgtcccactccacttcttatgcctgagctcctgtgttgcagaccttctttaagttcccaggtgcacagtgtttcttcctgccacagggcccttgtgcatgctgttttcgctccctggacactcctccctctttgcctagttctaccccccttcactcctgcttctcttagctcagctcaatcaccatttcctcccagactgtgtcacattcctctgttaagtgccctcatggccccctgggctcctctgaactgcttactataggtttaatttcataactaaagtgagctcttaacaaggtagggggcatatttgtgtttgcacaacattgtatccccagagccccacagtgcctgctacagaatagactattacttgatggttattgactaaatggataaaagcccagctggcagcttcataaacaacaaaggcaaagtggttaacagcttcaggaaaaagtaaaaaatactgggaatatcttctctgtacattccttcctctatgagttactatggatcctggtcctgtaatgattttaaaaccatactttgcaggagctttaagccattagtctaacttctctactctgaattcttttttttttttcccatttgtaaccagtagtggtagtagtagcaacaataacgcaacgaaacctgtgagagccgcaactcgaagggactgccttgttttcctgcgtctcgtaagttttctgcctttgacagggtgcagtcttaccacttttttatcacatgctttagtgaaatgtatttgttttccttctctgacaggtttctgccttacgcaggttccggtttttacaagttttcctatatattacctaccttataagattcttgtgagggtttaataataaaatggactgtccctaaaactcaaatatcattaggtaaatgctagctcttattatttggcttagttgtttctctgtatcactcttcctgtgtctaagaggatttctttgttttattgacatgcagtgaagacatgatgctccttacctggtgactgacccagcacaggagctgacttcctccccacaccagccccttcaggagccttcctcagctcagtcatggcaatgccatcctagcagcaacgtgggccaaaacactggcatagtccttgatgtctctcttctgctcacacgccacactgcatctatttaggaaatcttgtctgctttccctcatccttcagactattctcaaaagatcaacctgtgaaaatctaagctgcagcataccacactcttgctgaaaacccccaagtccttccatactgcgcgggattttttctccccactcagattgcccctccaaggtgagctgtccccagctgccctacttaaaatcatagccccgacactctgtatgccctgccctgctttcatttctgcacaacgctcatcaccttctgtgcatttcacttatttatcttctttagaatgtttccctcactagaatgtatgctccatgaggtctgtgtctgttctgttcctgcagacaatgacactgaacatactgtggactgccagaagaataaataaatcagacttagatgaaatacaacaagaatgctccttagaagcaaggacagtgagactttggtttgtttactgagttatctagtgctgctgaaacagaaataccacaagtggatgactttagcagagagaaatttattctctcacagtctaggtagctagaagtctgaattcagggtgccagctctctctctgtcagttctgggggaaggtccttatcgtcaatcttcccccggtctaggagcttctccgtgcagggctcctgagttcaagtgacacgctctactcctggcactcctttcttggtggtataaggtccccctatctctctgcttgattctctcttttatgtctcaaaagagattgactcaagatacaacctaatcctgcctcattaacataagtgcctttaatcctacctcattaatatcataaggtaggatttacaacccataggatacccacaaaatgatggaaaatcacacaatactaggaaacatggtctagccaagttgacacatatttggggacccaattcaatctataatacttattttgaacatgtcatcaggaaagacgaatcactagagaagaaaatcatgtttgttaaaaagtagagggtcggcgaaaacaaggcaaaccctcaacgagatgggttgacacaatatccctaacaatggactcaaacataccagtgatcataaagacggcacacagcaggcagcattccactgtgttatacatcaggtcaccatgagtcggcgccgactaacaactgttcctgctttttccctagcatccaacacattgcctgacatgtattaggtactcaataaatatatctgaaatgaatacacaaaggaaggaatgaggcaccactgctcctagggcaagaggtatcccacacaatttagcatatatgataaggcacaaactacagcaacaaacccctctcaagagtattttgggttgaggcacaaagagtggagaaagggccagctagggcacacctaagtaactgatgacgtgtgacctcctggcagtcaagctagatcggacttggcagtgatactacagtggcagcacccgcactgcctcttttgggggaactgctgagtatagaagggtgagggtgggtactccatgggctgagcatatgaaggagagcctgtgatgccattcagggaatgatcttatcaggctggctgcagtgattcacatggactgcctaaattcagggagatggctgctggagaagactctggccagaaatcccactggcctggggggccaaagggaggcagtttttatacctaccattgtcagtttgaatgaaatttccagaagaacatatgctgaaaaactagctcaggattcactgtccagatgttggtgaaatagaagccaaaatggaacattcagtcatcggcctctcttctgactccacagcttttagacaagcaaacaagctcatcttgttagaagctgaggactgagccatggatttgggtggacaagctttgaaagaaacttggggcagcaattaaaccaacttgggctgaacagtggacagtcagttctcaattagaatggttatttgcaaactcaaggaaactgagctttgataaaaaaaaaaaaaaaaaaatcaagagaattagtatcgagacctcataaaacagacatgttaacatggagcctgaattatgtgttactgtcatcaaaaggcatgaagaagttacagagagaagactggattatattacccaatatcccagagacaagacattttcacaggttttaaggctagaaggcatcttatagattctttggtcctatcttcatgtatcaatccgttccctgggctgatagttctctttaaaagttggccagacaggtgacaccagggcatttgctatgactgttctcacattagagttcctggggggtgttaactgttaccacgcttggctactaactgaaaggttggaagttcaagtctacccagaggcactttggaagacatacctggccatctactgctgaaaaattagccactgaaaaccccatggaacctagttttactctgacacacatggggtcatcaccaggagttggaattgactggacagcagtagtttttcatttttgttttttgattcttacatctcattgacttcctagtacttcctctctatgctcagcatctagcatttaccctgggcgcttgtattacttttttagtctgcttaaaaaaatttttttttttccctacatcagtgacctcaattcttttcagacattggctacacgctcccttgctgtttctcattacaaagcacgttgacttaaggaattaaaatccccagcagtcttggcctatgaaattcttagcacttggtacaaaacatcgagcaatagattagaaagttctatagaagtttactgaactgtccaaggttacctagctcattaatgatggaagcaattccacatctcaaaccttctgacccctaatggaatacctctaccaaaattatgagggtaagcaggatgaattgacctctatttttttctatttaaatgcaatactgtaacttctaaaatattgagaagttattcagagaaacatgttctaaaaccttagaaaacgatgtttggtcaagagagtttcagactatgggagccagacaatatgatatggtaatgaggctgcctggaattgccaccatcatcagccagatatattctaactagtttctacataatatcatcagcttagctgaaaaagaaaacaattccagggtggttaacattatgtggcataaaatatttacagtttttaccatttgtacttaaaataattgtttgaggccttcacatagaatcaaaaataaaaacttgatagctcattgacctttatgtttataactcctaaaatggtggataagtaaaaagagatattgtattcaaatgaaagcacaatatttttatagtttacatttcctctaactgagttaggtaatagcctggtactttacatgagtgatcctgaggctttcttaagctgttgcccattgccctaaagaagatgtttatgacctgattgggataattgtattctcctattaaatatcactccttctgggctagttattgttgagtgtaaatgcaccactttatatgcaaataaaatgtactgagatttgaataaaaatttctgtatacatctactcaccaatcatcttattacaattcatattaacagacaattcttcgccaggtgtgaggtattaatatcacacacaacaatcagcaattctttccttggattttgttttcagaatgttcagataccgccggaaatatcttctttcctctcagatacaatagatttggggttctgtcattggattttcattttgagtcaaaagattttactgtattcagagtactgagatgatttactggcaaacgtttttttctagcctgcacttgtctttaatccttttgcctagatgcccacagacttggaaaaatcaacttagtcccatatatgtactccattgcagatgacaccgcagagcccagctttcctaagaagtcttcttagatccggcctggcaaagcaagagcattcacgaacaccgcacatggtaaatgatcactttactccccatatttgcattttctttctttctttttcttatcttcttcgaattagatctttgagtgaaaggaccatagtgaaaactatgattctgctttacgcatttgaaggagctgtgttcttacatctcaaatctcatctcaaacctgtgccttgtattgttattagccgtctctcatagtactatgcaacaactactcaaaaacagcaatttatgtgtatttgagtcctgtccatgtaccgttaacaatataaaaataaatactctctaagggagacaccacctatctgtcagtttgttgtactgtggtggcttgtgtgttgctatgatgctggaagctatgccaccagtatttcacataccatcagggtcacccatggtggacagtgttccacagagcttctagactaagacagactaggaagaggggagtggtgatttacttctttaaaattagccagtgaaaaccctacggatcacaaatgagcactgtctgactcatttactttggacatgtcatcaaaagagggatcaatcgatggaggaggacatcatgtttggtgaagcagagagccagtaagggcgaaggagacctttgatgagatggactggcacaatagctgcaacgatggacttgaacatgttggcaattgtgaggataacacagaccaggcaacgtttcactatgttgtacataatgtcgccatgagttggagtcgacttgacagcagctatctatttgtccgtctatccttccattcatccacctgtccgtctgttcgtccgtccgtctgtccgtccgtccatccgtccatccgtccgtccatccatccatcctatatttatggggggaccaatataaagcatttaaccacaattttcacagcttttcttgcaggcttgctgccctttgcctgtaactgttagaggaacattggggtgtcttcaacagtgctaatgttggagcctgaactctggttctttggtcaacctttctaactctttggagtttaaggatcaaacagctgaatgggagctgaagagtaagatgtaggtgagaacatcttagaattaaaccaccaaataaagaaataaatgctctgataatggatttaattggttgtgttgacatttaattggctatgttgaaatttagagaaaactctacaaccaacgaggtagaaagtaatccatcttaggagtcaaagagaaacatttatatttcttgagacagatctaagaatttacatcgtaaaggtagagtctgaatatgatgacttttaattaagacttaagggtaataggagatatgatgaaatcattacttgcattatcttgaaaaaggtgggtaggctttcaaatatcttctaggaaatttagacagccctgttcattgtcaacattcctacttctcatgcaattcagtgactagtagtgggcgcctggaaaatgccatggaaccgagattcttgatcaacttgaaaagcaatgagattgataaatggcattttgagatagattgttcttgctgttagttgccactgagtggattctgattcatggcagccccatgtttgcataagagaactacttcatagggttttcaagaccgtgaactttcagaagcagattgccaggcctttcttctgaggtgccttttcatgggtttgaaccaccaaacttttggccaagtaggtaagtgtttcatcatttgtgctacccagggatgcctttctgagatacatttgcattacttgtctaaaggcaaatccatttatttgattaacatctagattgtaatttccacaagggcaagactcatatctgtttacacatcattgctcttgcccagaacagtccttgacacctaataggccctcaaaaatatttgatagatggatggatggatggatgaataatgaaggaatacatgcttttccaaccctagatattgtctttttttttttaaccaatttattattccatttacactaaaagtcacaactgaagattttttattttacttacaaagagctagaacgttgtttcttttgttgtgtagatgtcttggatactccattcaaggaagatcacttattccaacctgacgaagcctgtatcctttgcatattgaggctgtacttacggatcaggccgggctggtttgagcacacatggcaagagcgtgcaccctggctgaatcttcatggatgactccagtagagatactcgtgccccatcttgctttgtgggactccccaaggctcctatttcttattctttcaaaaccctagttgcctatcatttattccagttagttgggtgatacgcacacacacagagactaatgtgaaagtagactttttttttctcatagccttcaagatatagtaaattcttaaaggcctataatcacttagatgctctgcttaaaaactaaggaatggactaagccagtcataaaaattagaattgtttcttgaatgcaaatttaaagcaatttaattaacattttaatgttaacagggcttagccaagatcatcctcaaaataatttaagtaaagatcttcacggatagagaggacagaaatgggcttgcatggagctagtgcctacccgctaaaattcagaacaaaggggatgggacactagaaaagtttgtgctccaaaagtgacctttttaccaattttctttttaatcttgcccctctaattccaccctctaaaatgaattccaccctctaaaatgcagagacagtggtggttcagtgctagaattcttgccttctgtgcaggagaccccggttcgattcctggccaaagctcctgacgcttatctaccacccatccgtcagtgggggcttgtgtgctgctatgatgctggacaggtctcagtgcaacttccagaccaggacagagtaggaagaaaggcctggtgatctacttccaaaaatcagccaatgaaaagcctaaggatcacaacggtcccatcccattgtgcatggggtcgctatgagccagagggtgactccatggcagataataacaatcgaaaatgtagattcagtcatgtcacttccttgcttaacacattttgggagctccccatcaccttaagagtgactttttttggtctctagcttgtcttaaaaggcctgatctgaactgtgtccctctatagattcaattccattttcatttctctgcactcccggccttaagagaaatggactggaaatactaaagagctggtcattgcattgctgaacgccttgcattaattacgtcaccaaacttttgcttatgccatttcctatgcctggaatgtcctcttcacctttcttcaccttgcttgtactctcttcctttaagacttatcaagcttcctctaggagatgtttggtcaagtgtccctctgccgtggtccaacataagcctgagcgtacccccacctccgaatttgctgcattactttgaaatgaattatttacatgtcggttcctcctctagactctaagcattcccattacacaaaccatgctttagtcatctttgggcttcctgcacccattttgaaatcagagtcacagtaccaatctaatcaatatgcgttgaaccaaaatgagtatgtaacattaccttgctctcctatccatcaatactacctagcctctcaaagtctgatgcagcctgggagtttcccagaaattattaccctcttttctggtatggggccctgatggtgtagtggttaagagctatggctgctaatcaaaaaagatggcagttcaaatccaccaaccgctccctggaaatcctgtgaggcagttctactctgtcctatagggtcgctatgagttggaatcgacctaatggcaatgactttggtttctgatatatggagtccctgagtggttcaaacaattaatgtgcttggctgttaattgaaaggttggaggttcaagtccacacagaggtgcctcagaagaaaggtctggagatctacttccaaaaaatcagccaccgaaaaccccacagagtacagttttactctgacacatatgtggtcaccatgactcaatagcaatcggtttggtttttggtttttctgatatgaattgctcaactaagctactaacatccttcaaaattagagggcagcaacattctttattaatgactgttaacagaatccagaatactgacaatgatctattggtaaataacattatactgggaaacccaggtaggaaaagcacccaagcatgagttagctttgtgccttaacatttgcaagaaataatttaaattccaaagagtccttgtattcaagcatctcagttgtgttcagtggttaccaaaccatattatttgcatattttgagtacttctccaatttttccttctttttatttttctgtagattagagctcaagtagggtttttaaattcaaaaacataattataaagcatttctctgttttaatcttgtatgcaaactcattgcctggagggactttcttatagttgttacaaactcagaaaatatgatttgtaacagaaatgctacattctttagcaatggtggtaccagcagtcaccttgatattctcagtagctatggcggctctgagtctccaatttccaggtaatgcagtgacttaatcagtactcttcaaagcacaaagccggcaatcatttttgtcctttgtgctttttttcacatcttagaattgtcccccttcaatcttcctgggtgccacctacccccacatgggtctcatcctgtatcactattctttaccatttcttctgggctttgtttagttactatactgaaatcttatgcatacctctaccaggttgccatggggattttgtgtgatttgtcacgaggaagataatgctccacactaatgacgcaggaatccattcccccgccccttatgttctctgggattataatcaactgcatttatttgaatacctgtaagcaaaattcattttccaagtaacataatcagaaaacttactgaattcaccactaaggtgaagcactttagtgcagccagctcaatttctcatgattcagaaagagcttctgataaagtacttttttgaataccagctaaatgcttgtctgaatcctttaggaagagaaccaaaagcagttcttctacaatcacgtttctgcaaattccatcactaattgcatgatacataacctggctctatcaaaacctggaaaacgatacttggggtaatacgttaacccactgtgggaagtggggagcagatacagcaaccttatgcaaaaacacctatttggcatcgactttttggaggtgggagctaggggtgaaattgactatttgattttaacgaaaggcaatttaggctaaagagtgtgagctgaacaacagaagtcaaacttcaccgcccaacgaggtcttgattttattcctctcttgcttgaccttcccattgttagcctaaaatggggaaaggcctcaaaaatcacaccgatttgctctaggcaactgacctggatctcccattccatccccaaattggaaaaactgatttcaagatcatgattagtttttggaaagaagcatttcccaagtctgctgtaggtggaagaacatggcaatgaagccagcggtctgccaccagtaacatggcaaccagaggataaatgtagacatgaaagaagtcacatgtccaatcaaagcaggccaattatagaaactattcctaggccacactttgtctgaaaacacaaccaagtcacccatttctaaaataaccgattctgaaaagactgtatgtttttcactcaggataatttgaaaccatggatatccagatggaaacccaataggagagataagtaggatggagaggtaggaggtaaatagagctggagagacagagtgaggtgcttgggaaaggggagaccatagtcagggtttgtgtgttcattttaaaggtagagctgataggattactttatatatatcagggctggttactaacacttaaaaggttgagacatagagcagaaaggacagaaagggtggggggcagtgtaggaaaagggagaagcagaatgaaaatgcctcccccagggttggaataaaggaatcctctgggaagcctttctaaacagagttggcaaagaggcagttgcatatcagaggtcctgtaggaattttagataaattgccagagggctccaattcagtccagaactggacaattctgggcgacacaggagttctgtcattgtctcaatgagaatgcaaggaagtgccttcctctcagagtctgggacctgtcctactggatagttaatgtctgaaaagtaccagagcaggtgatggtccctgagggcttgttctctgcatctcaattgatgagagtgggagaggtgttcctaaaaaataatgcaagatcatccagggagagaaataaaaatgtgaaaggaaaataaaaccagcctctaagagtggaagatcatgacagatcaaatgagagctgggaggaaactcaagtctcagcaaatggaatcaataaagaggtttgaggatcttcccatgcgggaacataccagctgctagggaggatccctaactatctcacgcatgataggcgtgagaaagcaagggtcaatgccaagcaggaggcaaagaccttctctgatgctggagacttcttgctgaggtctttggaggcagccatcggcccctctcacatggctaaccagggcttggggtattttctaggagcatgcatctgagatgagagggagagactcaccaactacataaccaacacaccctgtttctaattcaggtggagcaatgataaaagcaacattaggaaaattaaccatgttctggtatctgaataaacaacttctgaccaaatactgcctgtggttccagtgtctttttggagcttttatttatggtgctcttgtagcaagcaaataggaacagaacagagatgaactcaagggattaaagacatattcccgccacaagcaaaagcaaaaatggtataatcacacattaaatcaaaaaacattttgcagcttgaagggtgaaaactggaaagacaagacaatatagggcagtcaaactccaaaggaccaactcctgatagaaaggaccacattcaagttgtaagtctagcagatgattcattgaaacctcaccatctgtcataggaaatccatgtcatatatgggaattgtatgggctctatagtttttaatttgtaaacttattttggttttatagttaagaactataagcatgatgagtgtgtggaaggaaggacaaataatcaaggaacagagagaagcagaaatatgtaagaagtatcaaaaaaacttcagagtaagtcatgattcataaaacctgatgaaatctgcaaagagtcttacggtacggctgcgtttagggccagatgagaacttggatgggattgacttgtggcctgaagtagatgatgtaatgttaacagaggctggggagaagcacctatattgcttccaccctttctatcaagcccaagatcaaggcaaatgatctccatgttgaaaagaaaaggaaaacgtgaagcccaagataagtgaagagatcccgagggagattaacaagctgctttgcataaacccaagccttagccataaatcacaccctggggtaatgaaaagacttcacatgggactggggaagcactgttggcaatctttggggactcacaatgagtcagagagggacctatattaaaagcaggaaaatatgctttttattttcgaaagaaaaaagctgcatttcgaagcaacaaatcagcttttagtctgattcttcccttcttccccccctgccaaaaaaaaaaaattactggaatgcaatgttttaaaagatggtgtatgactgtttagaaaataaattgatacggccactaggagtcacaggagctcccaatggtatcttttttggagaagggtagcaagactgagaggcgaagtcaatctagatttctgctgagtttgaaataaagtttttattgatgaccatgaagcaagctgtagaaatagggacaggatgatcattggttgggtggaatcgcagaggcatgctgtaatgttctgtgtctaacaactgtgctggaatggtgcaacggaactgcacgaaatgcccaggctcgtagtcagaaatctggggttgagtaactgctttgccactgactagttcagaggctccataagctacaactatgagaaccaaatctggcccaatgcccatttttattaataagattttattggaacatggtcactttttatatatatatatttttacatattgtctatggctgctcttgcattacgatggcagcgctgagtcactgcagcagaggagacatggcccactaagctaaaatatttactatctggcccattacagaaaacgtttgtctaccctttggctatggcataagctagaaagtgatattcattctttgatgttcatttttatcatctacattaatagaaattggcaactaaagcaaagtgtttcagaaggcatctcatgtaatcatatatgggaaacactttatggattcttttttacacatataccctttgtaccaaccctataaaaaaaaccctataggacagagtaaaatcacccaatagagtttccaaggagcagctgatggatttgaactgctgactatttggttagcagctgaactcttaaccgctgcaccaccaagtctccatacacatataaagcctgtctcatcaggatcactctgtctgttcaaagattataacaatggcactgtcacattaaagacatgactatcttcagcacacaggagaataaaaaatactgaatgggtagatggatggatgaattagtgaatgatagtagtaattatatcctatttagcgttacctaaacagggaaccagggatgttttagatgtattaactcatttaatccttgaaacagacttcggacattatttacattttactgctggtaaaagaaaacagatataaacaaccgcagcagaaacaataaataatatttataagctacttattatattctaggagtcaccgggtggtacaagtggttaagtgcctggctacaaactgaaaggtcggcagttcaaatccactgagaggtgacgcagaagaaaggactggagattgatctacttccaaaaaaatcagccactaaagagtctacgaagcagagttctgctctggcacacacgagggtgccatgagtaggatcaatttcacagcaactgtctgattgtttttactgtcctagcttagagccctgctggcacagtggttaagagctcagctactaaccacaaggtcagcagttcaaattcaccatccactccttggacaccctgtggggcagttctactgtgccctatagggccattatgaatcggaatcgacttgaggacaatgggcttggtttttgttttattttagccaatgcgctaagtacttaaaaaaaaaaaatcaagtgttatttcatttaatcctctcagctgccccctgaagtaggtgttatcatcaccatcattattccatctttacagatgaggaaattgaggcccagggaaactaagcaacttcccaaactcacacatctgctatggggcagagctggaatttgaaacctgtctcctgacgctaagctccaaaccatcggacactgggataatggatttgaattatcactgttaagcttattatggataaatgtaaagttttacaaaaagggttaaaaattaactctctgaagtgccctgacctaatactagtttctgtgaaaaataagttaaaaaattttttttttcattttgaacagattttagaattttagaaaaactgcacagtggcatagaattgccttttacattcccaacccagcatcccctagtgttaacacttaaacataatgcagtaatgagaatcaagcaattaacactggtaaggacttctggcgatgcaatggtaagagcttggctgctgaccgaaggttggctgtttgaacccagccagtggtcctgcaggaggaagacctggtgatctgcttctgtcaagattacagccaagaaaaccctctgaggcagttctactctgccacatggggtggatatgagtcgaaattgactcaatggcgcctaacaacaatagcaacaacactattcactaaagattgtacttgaacttcaccagtttttccactaatatcctttttctaggtgaggaccctatacaggatctgactttgcatttagttatttatccttagtctcttccagtctataacagctcctcagtctttccctgtctttcatgttcttgaggctttgaaacaatattatttattttatcgaatgtatctcagtttgggtgtctgatctcttcttaggattgggctgcagcaagaacaccacagaaatgttatgttctagtggatcatatcaaggggttcatgatgtcaatatgtcttattttttgttttaactgactacaatctcagtgagttaacatgtagcctagctataaacacacacacacacaccctcatgatgtttctgactatattaagacattgatgtgaactgcaagcaaaatcagtatgagttctacctttctctccaaaggttagattgttagaataagcactgggctgataaaggctgtgagcatcccacatttagtttctgttctttactgggtccccactagctggtgaagcatgttgcctgacagaagctgacatttagtttgtatatatttgaaccccaaatgacaggaccagcttggatcacatgagtgactgtgctccaagtactgacggagtgcagggcacgtgccacgctagaccctggtcacctgcctcgctatgagccagacttattggatgatgggcactgaaagaaggttttctataattctataactaaacttggcatatgtatatttacatacgtttattgtgtgtgtatgtgtgtgtgtgtgtcaccttgattctgtattaagattgaaagatgtaagtcccatatgaaggcaaggagagtgtattttctcacatcttgctcagctagtagccaacctcaaaactgcaactgaatatacaaagagagcttgatatgaatacattaaagatccaacactcttttttttttttttcactctactcagatgggcacaattatggaggccatcagtagactcccttttcatttattgatctggtttccataagcctcctggatttcaacattttctctctcatttttcttgttagatttatagtgtctgaaaactacaacttcattcaatctgaaatgtgttcactctacaattcagtcactgtgagaaaaaaagcctttaataattacagtatcaaaggcataccctgctagcactcaaatacccttgtacgatgttagtcatcaatatttctacagaaaatgccttcttcaacaatatgcttttattatttcaggtatagacaatttttgatagcatacatttaagccacataataaaagaataaaggggaaaaaaaacagtcattttcacaaaactaaaaacctgcagaattgagaaaaatacgttagtggatagattttttttttttttttgagagttgtagtctttgcaattttggacaactcttttgtgtaaaaactatcatcctgagaacctatctctgtcagtctcttcttgacagtaaaagaataaagaaaataaaatcagaaattccttacagaatttctaaaataattagtgatttaaatcttaaataaatatttgaattaagtactgacaactaaataaacatctaagtaaattcatatgacacttaaaaaattgtaacatgccagaaaattaaacaaaaacagtaaggaaatatttgttaaacattattattgatataacaagactcttaaaatcaggacttgaatttcttatggagtaaactgtggattgaattgtatcaccctacaatatgtattcaagtcctggccccattacctaaagatgtgattctgttcggaaatagagtttttgttatttaatgaggccattcagagtagggtgggtcctaaacctaatccctctgagttataaaaagcagaatacacagacacacacataggagaaagacgccatgtgaagatccttttaaaagcaaaggaactccaaggattgccaacagacaccaggacctaggagagaggctcacagaaggaatcaacacagccgagatcctgatttgtacttttagcctgcagaactgtgcaaaaataaactgctattctttaaagccacccacttgtacttatttctgttttgacaacactaggtaactaagacagggtataaattggcacagtcttttctggaggacaatctgacactagtagtaaaagttttaaagtacatatccagcactctgttctcagaacttctcataaggaagtataatacaagcatgcaataatgtacacaaggttttgttcaccaaagcttcactcgtcatatgaaaacactgaaaataccataaatgtccctaataaggattggtaaattttaaaccaagcggtctttgacttctatatgttcaaccttgaaatagcctgggcttacacagagattccttagagttcttctcgtatgctaagtttgagctcttggtcatctgaccaatagagaaagtcaaaacaaaacaacagcagaaacatcagcaacaaaaccattcccagccttggaatggtaacacttcccgactgaccacagttccaggtcacagtggctgcagccctggcctccttggtatcctggagctgagagaccattgacaattttactgcagctgtttacacaggatgagagcaaaggtcaccttggggatagagggaagagggactcagcaatccgaaactctaggcttttccagtgaaagccactggacttttatctctgctacatgttggttttctaggtaagattttatttgaagtagttttgtgagcgcccccacaaaaagaaaagaaaaaaaaaaaaaaaaaacacaacaaaaacccaagtttggaaaccactgctgcaatgcccaacagtctaataatttttttttttttgcttaaatgattgcaaaccagaaatacggaagtgctcattttagtcacaggaagcgtaaatctcacaaatttaggagagagctgtaatctcttattcaaaatcctttacaacagatagattttggaaatcagaatattttggattttctagagaattaatacagagaatatattacatattatgtaacactcccagcaaggatattaatattaataaatattgttattaataatgaatattaatgcaatcaaatacattatttctagagtgaaatataaatattcttactaaatgaattaaataaaaattgtaagttgcttcataccaatccacatcaagattttctatcaactgtgttaggccaaactttaaaaaaataaaaaagaaagaaagaaaagttttgattttcagagctattgagattttgaattgtggctaagggtctgtgcacctgttcagtggactcaactagaattcactgggaatactgcagagagtccagctgcatcagatgctcactgaacagatgccaggcaaatgaacgttcaattaggagggcaaagagcaacagtaaaaaaataaataaataaaggctttgtataaaaggtagaaagatctcatcagagaaaaccaattaggaattttacactctctcggcagtcagtattatgtctattcctatatgtttctctaaaaagagtttccaagaagcgactatatatgctccaatattcatacaataccgtaataatttgaagtgaaaatatgtccaccttatgttgtagccacaacaatggacttaagcatactagggatcatgaagatggagggcaacatttcattctggtatacataaggttgctgtgagtcagggtcgactggacagcaactaacaacaaacagcatattgttaaatgggaataagttgcccaaaaaaacacaagtagttttttcccattgctatttagataggtactttatttttacacaaataacacatactttctacgtttgtttaccaaccatgccccccatgaagtattttcataagtgtgctatgctaatttttttacagtgacatgtagaataaaaaaggtggcatagtggcaattatgaaaataccttgaggcggcaggagcaaggttggcaaagaaatgtagaagacacgcattatttgcataaaaataaggtagatacatctccttacccatgtgagaacaagaataaaaaaatctatgaaaaatgataaatgccaaaatgttaacagcgtttacctcagggtagtgtgaattcagttgatttttttcttttttctctaaatgttctgtatcatttgaggttttttttttttttttttaacaatgagaaaacatttttgtgaacagaaaaaaaagttctttatctttggtgaaaaatgcaattattagcagtttatatataacttagtctctcaggactccagtgattcacctcaagtggcactgttcatttgtagggaaagtatatttgtattcaaggctgttcacgcctagtcctctgtcctctccatttttccatgctacatttcaaaatgaaccatggggtatgatccctgccttcaaagacctaatgactgaattgaggatataaggaatgtaagtaggaagcaatgatcaaacattccaagatgctatctacttaagtaactgctgcaaatccttttggaagcagggaggcgtataaatcttcagtaaaagggaatgaagtgtaacactacatgaaacatattgcaaatgcttatgaattcagaggagtggaagataagactcagaagtaccagagaaggtttcatgagtaaaagatggatatgctttgaaaaggctaaaaccggggaggagagatttctacaaggatctgtccagacaacaggactcatggtgactaaggacataaataaacctccccatgggccggggaacagaaacaacaggattggataagtggagtgagggcagatcatggaaagctttgaaggccaaagaaagagtgggctagatttgatgaggaaagacatgggaatgacagatgacttttatcatggaaatcaagtggcaaaagccatttaaattgtgtgaatcttcagcaatgtgtaagatggattggcaggggaaggctggagatggagaggcctggtacagagctgtggaggtgatggaggacaaggtaaattgaccaagaatcaacgttacgggtggaagtaaaaggttgaatcaaaagaccccaaggttttgaatctctgttgctgaaaacagtaatcctcgaccaagacagatggtttaagatgcagttcactatctcagaagacagagcaaagagtggaaaaaaaaagaaaaaacaaacatgaagcactcttattcattaaaattataatatgactatttagctttgttgattagagcacagattcacactttgaatttgcaaaacagtttgaatctactctaaagattaaaccatgcccctctcattttacccagctctcacaagagtggggctaggtagaaaatatggaagacagacaatccaacaccaattaaaggaaaacattaaaaaaaaagaataagcaaaaaacttcaaaatatgaacactagctcagtagcactttctttgcatgtgggaacaaaatcttccacagcttaaatagccagatgcgtgtgttcttttcatttactaaaaaaaaaaaaatccaagtgtattcttttgatatataaaaaaggagggagagatagttaatgtagagactggaataaaatatagtcattcaagcagttgtatcttccccatgtctgcttaggtttgctatatttcatttgaactatttttgaagaaataatttatcttcattcagtctgccccatcacagacacctcgcttaggttggagtggctggtgttgctgggaccccactgagtctgaaccctgaaacactgctttgaatttcatctcgaagatcaggtgacatccaaatccacttaacgtttaattggcatggtttttgatgtcactggagaccttgatgaaattacaatcctattagtcacgatgggggaagacaggagaccttaggtgactaatgttccattcataacaagaaagagacgtttagcatttgtaaagggcattgatttctgatagttcccttaagaacagggctcaagtgaagaaatatgaccagaaaaggcttgggaaagaaatgatagaaaaggcaagattgcatttatccaaacttaactctgtgtacttttgacaattgggttagaatcaaaagaattgagtgttcatgtaaatgtaggtaggaggaaggacagcgagggacagaaggacatgcgtagctatgcagagattctggtactgagaaatctcaggaattacactgtgcccttgattgatgccaaagaggtgcctctaaatataaagggtaaatggaggttacgtggaaagggcttttaatcagggtgataaattgccagattccattatgcttaatgagtctcattgatgcatagctagacccaagaaaataataagacccctttcaaagtctagtataaacaaattagaattaataataaaaaatcccattaatgtgcacacaatttggaaaagttaatgaagtcaatttaaaaagtttagataatgtatttttagcattaaaaaaaatgcctggtcatcaaaatgaatgttttcttcaatttttttgttttttttaccaaagtatgtcctttgtaagacttgttagctcttctccagggcaggctctgtttagaaattatggaaggtggcaatgagagtgttgcaggccttagaatgtttaagacgctccaataagcaacaaatgagattcactcaagtgaatctgccaatttccataacatgccttctaaccacatgaaggctacaggaagatttgggttctcagtcgccagactgataaaacatacatcttttgcttttcagtataaagtctcaggtaagaaacaagaggcaggatctgaaaatatctatgtagggttccaaagagagatgattgtctctaatcagctaagacctctggatctaaacaagagaaaatcagctggttttgcatcaacaaatatttgcagaatacaccatcagtaatggattagaaatcagactctcacttcttgccatatgaattcttttaagccgtcatttaaaaaagaatctcagtactcaagcgtataatcaaagcaaaacagccatgtggaagatgagaaaaaaggtagcccctgttttgtagttaaatccctaggccagaaggcacaatcggacatctgtgctgagttagatttccatgaaaacgaatgccatgtgctccttaatgcaatgtgaaataacataactcatggtttttggatggcaccaaggggcatggaaattgtccacaatgatgtctgcttcagaagttaggaacaaacctgtttatagcatcactggagaagcaggatagtgtctggaagcactcaataaatacttctccaaatctgaataaaagagtaagttcttttatatacaatctgctatgtaaagtttgcacatcctctattttaccataaaacataatatatgttctcactcacatctgctttcacctctgaatcaataaagtctgggggcctctcccttttcaaaatgttttctttcctgggctgttattgtgctgcccactcctggttctgctcccaaacctctgaggacttcttcattgggcttcctgctgccacttgttgctgttccacccctgttcattttcttttacattttctcacgcacagattcattgagttacactatttcaagaaacaaatgtctctatgcaagctcgtccttaaatatttgcaaagttaccactatgctagattttgataagagatacttccccaacctcagtgtttacagtagggtttattaaggaatccatccataacattcaaagttgaaaaatgattttaaggctaaataagcaagttaactgtgaagaaccacaattagagaggaaagagagtccttttgttgctaggagaagaaatgagatttgagcgggcccttgaggaatgagtggcatccatacatggcagctcaagtaggagagaatatcaggaaggccaactgttatgagcaaagatggtagggatgggagagcatggggctgatttaaggtcagtgaagagactagtgagtctgccctgaaggttacattatagggatgatggggatatgatggcaaagtaggcagaccccatctggagcccttcaaatgccagtataaagagtggaatgttatcctgatggttaaaaggaacgatgtaggattttaagcataggagagacttaataaaaaatggtctgctcctgatttcttaatgactataggatactttctcaataacccaacactatgtgcttgctccaaatcccatggttctttttctgttgcccactggcttaaccctttctaccagtggcaacaacattgcccttggattcaagggctgatatccttggaagtatcttggaggtctgttcccaacttcaacactagttgaaaattcactgaacaaaatcatgttggggatgctttaaataagtacctattcctagaccaagtggatctggacagatttgggactcagatttcacatatgagtcattgattaactgctactcctcttccttccaatcatctgtcaattttacccatttgcttttaagcccattgtagtcactaaaactgagaactttctcattcttgaccagttactaatataggcaccttctgggttccactctctcctctattatcagcatctattttttgaagaattcaattgggatcttggaaaataccaatacaatcagtccagagcggtgctacaagatgtgccagtggcggtgattctgagacaggcacttcccgaataggatgggaaggcagccaaagacaccatcagggaatttcaagtgggactttgataatgcagccactctcagcagatacagaccaatctacacatccttggtagcaaaccctggtcccttaagcaagccattatccgagtgactcctcaatggaaacaccttttgctgcattcccctctgtagtaacgttcacagcctaatttcaaggatgatacaagtcaatgcagtgaggagcaaccaggttattatttcagatgtcgcctctccactcaccccaaccccctacactccatttgcctctacatcgtctctctatcctacaggtgagtgccgtatcctacttttctaagtcatcaaaatttgttcctatcctgcaattctttcatacatctataaccacccaccagaaacccatacatctctattatcctttattatcaacttaatactgacaaaataataatcaagacaaaacgtctgccttaaaacctaacatgactatcaaatccaaatataaataacttgggattggccaaagttgcaaattactaaatgtaacaacggattctgaaaaaaaaacatacaggttggaataagtaccataaaaatgttacacccacctcactgaattcttggtgaatgctacagcgaagaattttgccaacaacaacactatttacaattcactaagtgagtaagaaggaataaattgtacccattaccattccttactgagaccaaaaactggtaggaagagcaaggcgaaaactcaccaaaagcatttcacttacagagccttaaggtaaagaaagttaggaaagtgggtttaaatagcagctttgatttctgctagccatccagtacccctctgacctatctggaaagaattcattgactatctgctatggataaagcagtgtgaagtttagaacaaaagcagcagagcctcagggctcaaaagagcacgtgacgtatgtgcgcagggatctgtgaggaagatggaggcataggacagagaagaaaatgcgagatattgacaagggctagtataaaagctatctaaaaagtttttttttttttaggatgtaggccctgtgatgattaattttatgtcagtttggctgggctgtggttctcagttgtttgacccaaacctagtctagttgctatcatgtaagtttacatgtgattaaataagttggctttgagtagagcaaattgtcttccataacataatctaatgtagttaccttatatctaatgctatataatgtaatgaccatccataacgcaatctaatgtcatggattaattgatcagttgaggtcatgccagtgcagggtgggtcctaaacctaatcacttctatgatataaaaagggcagaatagacacacacacacacacacacggacacacagacagtgggtgatagataccatgcgaggactgtctacaaatcaaggaacaccaaaggatcactggcagacaccaaaactatgagagaagctcacagaaggaatcaacatggctgagtccctgatttagacttttagcctcaagagctgtgagaaaataaatttatgttctttaaagccacacactcgtggtatttgtgataaagcagcactaggtaagacaggccttggtgctagcagacaaaggacagccctgccagggtaatcaaccagggccagggcagctgctgtcacaaccagccccgaacatacacagtcacagaagtccaagctcagacaaaagcagggtttcccaaagtgtggtatgggtaccactagcattttgtggaatgactttaggcagtttgcagatatacttttaccttaatagctatgtatttcaatatacattagaagaaaataaagaacaactaaaactaacctttaacctaataatttcattgatattcttgtttatgactgttaatttaggaaaagaacttaaagaaaaataacaaaaaatgttagtataggtcttactcagacatgacaaattcatgaaggttatgcccaaatggatgaagtttggaaaaacttaaactaaaccaaagaaataaggcatgctatggagtacaataatctagtactaacaccgtggcttggtggcataatttctaccttccatgtggaagacccaggtttgattcccggccagtgcacctcacctatctgtcagtgaaggcttgcatgttgctacaatgctgaacaggttacagcagagcttccggactaagacaggctaggaagaagggcctggtgatctacttctgaaaatcagtcagtgaaaaccctacggatcacaaccgtctgatctgcaactggtcgtgggaacggcacaggactgggcggcatttcacgtcattgtgcatggggtcgtcatgagttcgggtgggcttcctggcaatcaacaacaacattaaaagaaccccacatgataccctcagacagattttttttttctgttttagataaattctgggcattaagccatctgagttcttatgcaaactctcaaattttcacagagtaaccagttcggaaaatcttaatccaacttcttagctctcagctgccaatttttgtgtcaaattgtctgaagtcagattggaaagggtgacttccttctagtgcgtgcaaatcacaggcccgggtgtgggactgactagcggcaggtataattaacctgcccaaccttccttcccaggcctagtcatcccagcagtcctggggtgtgccacagctggggaaagggtatcagagggaaagcagcagcacctgctgcctaggaaattaattgaaaagcaggaaacctccccccatttcctctcaccccaattgagaacatcttaattgcagagaggctaagctcattaagtgctgttcaactgctgtcaggagattatcaagtattaaatttaaaacctatatcgtctttactcttcctgataaaagttggtaggaatgtttctccaaaagcccgatctggaatgactgtggggtggtgatttgttaaggagtttaccccgcgaatgtggatgtgagcaatttgtttctaattatttcagtaaatgagctttataagaaaccctaataaaaaaaaaaaaagtaacttatgccacagaagaataaattctggactcccaatatccaggtaatgtaaccatgctacttgagagctgccttgtcaataatggtagtctttgtataatgatagaaccctatttatataatatgctgatggtaccctaatgcgagatcaggttttcatataacattagttgaattttcagcatgaattcacattcagcctctgcattggtcagaaaaacattatttcacacttcagtgctctaataaataaattaataaagctcaccacttttcctggaaaaccccgatgtgtatatctctctcagttccaaataatgacaacctcttagtctcgcccttgtgcgccctttgaatcattcacggagagagaattattttctagtctgccccaccctgcatctgaattccagatgtgttttaccaaactgggttccagccagagctgggaaagaaatctcagctctattgacagttttgtccttttatgtcaagcaaagggaggaaagtgaccaggattgtcttgttctctttaaaaacccacaaagtaccaagtcccatgtttctaggataaaatgcattaatacacaatgagcccttctttatctgggttgtcagctcaaagcagacaggaaccatggccttctcatttattcactttcatatccccagtacctggcacaatgcctggcacacagtaggtgctcaatagatacttgttgaatgaatgggcaaacactgttagtattatatccctgatttgagaaactgatccaatgagatgtcagggtatgtcatagtacagtaaaatgcatcagtcatttatttaccagggacctcttatacccatccttgcgtaagatatttctgaaatgttgttagttgccattgagtcaattccaactcatggtgaccccatgtgtgtagagtagaattgcttcacagggtttttaatggcttgacctttcagaagcagatccccagacctatcttctgaggcacctctgagttgtccaaaccaccaatgttttggctagtagttgagcacttaaccttaaaaactaggatttataatcagatgaaaggcccctaggtggcacaaaggatttgtgctcaactactggcctaaatgttgacagtttgaacccattccacatcaccacagaagaaaaggcctggctgtctactgtttacagccaagaaaatcctatggagcagtccaactctgtaaagcatggggtcgccatgagtcagaatccactcgatggcaacaataacaacaatgtagtcagaaaaagggagccagactaactcaactaaaacaccagcaaacaaatcagcatatatacttatttggaaagaggttgataatattatattaagtgtcaaaatgcaaactgcaggagtatacgggagacaaagggtccagagaatacttttggtccctttgaatctcatcctttggggcctaaaatataatttccttttttattaaaaaaaaaaaaaaagatattgatctgttttttccctctaaaatatttgtgaaactatgtgcaaacacaggcagatagacaagatttgtacaagcacaggaaagactctaaaagttcacccatcaaactgttcaaactatttaacaatgccattacatctgagcagccaagtttgggaaaatatgaaaatcatttcatgttttatgcatttctgcattgtctgaatttcttacagtgagcaagtatcatttttgtaattaaaccaaacaattaagattttaaaaagaaagttgcaatcaaattgctaagttatgtgatatatattgagtgttctaggagctcaataaaactttaattgtctggaatgcaattagccaacgacctcaatcagccagtatttttctcctgcactctactcttgggagaaagacgcaaatcatacgaaaaccaattcacaaggagaatttagggagtagtgttatgcaaccagagtaagtagtttgagttgttttaatttatctgtctccatcttgatttccatacaatgattagtgctgtttggaccttcgttatcctttgtataatcccagaaaagcagcttgtcagaatctcaggctccaaccagatatactgaatcagaatccttgggaatagggtctggaaatctggattttaataaaatcctcaggtgatacgtatgtgcgttaaagttgagaagtgctagttcaaagactaaccctgaatgcctgcattattctcaatttacaaagaaagatagatcaaatttccattagattgtccatttaataggagtccctgggtagtgcaaacagttaagcgtttgacagctaactgaaaggctggtggctgaaactcagccagaggtgcctttggatggaagtcctggcgatctgcttccgaaaggtcacagccattgaaaaccctatggagtacggctctactctgtcacatgtgtggtcaccacgagtcagaaatgacttgatgacaatcggtctggttcatttaaaaatagaaaagtaaacattttatattttctgcaggaagttctaaacaatgttaactagtaaaaaaaaaaaagttaactagacatatagtcatccccctcctatcatggaaatgatattaaaagacaaagtaataaaagatggaaaatttcagccccagaataaatctgggccaagtataatcctgcaattactggttttaaccagcaggtattactcatactttggcaaaggaaatgtggacagacagatctcacaactgggatgaaaaggcatggcactcatgttaccattcccatcccataccaatgacagatatcaccaattgattatgacactttgcctttctaatctagatgctgccccagattccttctcaacagagtatcacaggcagccatggcccatggatcaaagttaacatttaaaaagaaatgtttttccattcccatttaaaaattgctggaaatgatacataacccaattaaaaaacaaaaacaagcccaacccgttgccaatgagtcaattccaactcatagaaaatcctacaggacagagtagaactgtcccatagggtttccaaggagtggctggtgaattcaaacagccaaccttttgtttggcagccttagctcctaaccactgagccacaagggctccaataacccaattgagggattataaataaaggataggttatttaaggctgcattgagtgaataaagcaaacatgagagatttgaaatgaccactcgctatatctagaaacttatttatttccattgtccaaatggtttgattaatggagactgaaatcagaaatgagaactgtttaattttaaagccagatggactcctggagactcgttcaactattgctcccaggaagaggaaatgtggatccagagcagtcacaatgaccaaatcacacagctaatcacccgttatggtagagcccaactggatattggttctaactaaccaggatttctcccactgcaccaaatggctcactcctacagccacagtcgccactggcagaatacatctggtatagatacgcttgcgaatttggagacagagacccacgccaacccttacatctgagcataaaacacacataatggtggaccaaactccttggtaagtgcctgtacccagccaccagggggccctctgctggtggactgggagatgctacaaaggaaaagctcctccattggccctgagcagcttacttcaggagccttgggagtgaaaatgccatcaggaagaaatttcacatgccagctctgaggctctgcttactgaacatccactctcaggcctctcgaaggtactcaaatgcaacctgtccaaagttaaactcacgatttgtacttcatccttcataccaaaacaaaaacaaaaatcaaaacttggtcctcctagtagttctctgccaataaaaccaccattcattcgtacgctgtgcaaggctgaaacctaggggtcatccttgactcctcctacttcctcaatctcaagtccaatcaatatcaccataaattctgcccctaaatagtttggggattatccacttctcaacatcttccggttactacgctagttttaagtagtatcatttcttgcctatttgcaacagcttaattggtcttcccaaatttattgtgctccctttcctaagctgtccacagcacagtggccagagggctttttttttgagccatagcctgactgtgtcactcacctccatttaaaactattcaatacttacccattgcatttaacatgacactcaaagccctacacaatctgaccccacccatccctcctgcctcacccttcactcctccctctctctcttcataccaccacactcaccctctttcagttctctgactcttcctgatatctttcaccacaggtcctttacacatgccacacgggccacttccacaaagcagccttcaagattccccagtgcaggtcacttctctgcaataaactcttacagattaatatttgtttcctcaggaggtcttacagctgtatataactatacattcgttaggacactatttgtttaatgtctatatccctgtctaccaccccattctcctgaaaacaaggcttatatccgttttaactcaccattttattctcctcagtgcttaaccaaaggatacagtacccagtgccgtcgagtcgattccgactcataaagaccctataggacaaagtagaactgccccatagagtttccaaggagcacctggtagattcgaactgccgacctcttggtgagtagctgtagcacttaaccactatgccaccagggtttctgcacatacatatatgtacataaaatacccacaactacatatatggaaaccctggtggcgtagtggttaagagttcagctgctcaccaaaagggtcagcagtttgaatccaccaggtgttccctggaaaccctgaggcagttctactctgttctacagggtgattatgaataagaatctactcgagggcaataggtttggtttatacctatgtatgcatacacacgtactcccataggctctcccacacctatttagcatacatatctacctatgtaaccactcacaaacttttggttgttattatgtcttggtagaattttctgtgttatagcatttaccgtagttgtcctttattcttatatacatctcatttaccttggtaacctcattgaccttggtcacattgtactgacttccccatactgtgtattgcctttcccttcaccggaattaacacgtgtctattatctagaaagtgattctccttccctcctcctcccatccctggtaaccatcaaataatgttgctttctgtgtgtaaacctattcttaactttttataaaggtgagaccatacagtatctgcccttttgtgattgacttttttcacttggcatgatgtcctctatacacatccaggtaataagatgatgtgcagaatcatcattctttatcattgcatagtattccattgtgtatatgtgtatccattcatctgtcgatggacacttaagttgcttccatctttttgccattgtgaataatgctgctatgaacatgggtatgcatatatctattcatatcactgctcttatttctctagaatatatacgtaggagcgggagtgctggatcatattgtatttctaattttctagcttttcgaggaagtgccataccattttccatagtggttgtatcattttacaatcccatcaacagtgtataagagttccaatctccctaccacctcaccagcatttgttgttttctgtttttttgatcagtgccatttttgcaggggtgagatggtatttcactgtagttttgatttgtatctctctagtggttttttagtggctaatgatcacaagcatctcttcatgtgtttgttagctgcctgaatgccatctttggtgttttagcttataccattgcttgtgatccatagggttttcactgggtcatttttggaagtagatcgtcaggtctttcttcctagtctgtgttattctggaaactctgctgaaacctgtgtattatgggtaactctgctggtatttgaaatactggtggcatagctcccagcatcttagtaacatgcaatgcaccacaatacaggaagactaatcactagaaaaggacataatgttttgtaaagtaaatgccaatgaaaatgaggcaaaccctcaatgagatggattgacacactagctgcaacaatgaactcaggcataccaacaattatgaaaatggaataggaccaagcaatgttttgttctgttgtacataaggtcaccatgagtcggagccaaccacataaccacaactgcttgcgaagcaattagtagaataatcatccacgtctacggggcacgtatgagagtggtacattctagtatttctgagggaaagtagctccttggctgcatcagtcatttacaaagttccctaccatattgctgcagaatggcctagttttgggagaactatatcttctaagatccaggtcctgctgttcctctgagttcagacatgactgtcatggtgtcgtatgtcttgtcttctcagcctgagttttcttgtaatatgagccagagactccacgtacatagatgtcccagtcagtcttagatgtgggataatgaccaacctgaggagtgtcagcaacagaatataccagagggtggttcctaatgctgtggtatttattagactcctcatagagggacagcacagaacataatgttctcctactctacatcatcatcttgaagcaatttcaaacattctaggatcattaagtgtatggaatgatcacgtatttctcaggcgtgtcatagccaactggatcatagcatttttgagatatgtaaaaaccattagaaagaatggttccattcttgcttatgtattcatgcatctggtctctttcctcctcttccgaatttgccaaagaaccccaatgttgagctattaactaaacctttttcacataaaaatattatgctttttcagagttatcatacagttgttcctttaacaatagaaacctaaaagtgaaattatccttcagaattcactgaggcaacagaactgcttccaggtccctcacctaaggagtactttgattagaacaattcccctatttggagaatacttgaagaatctttgccaaattcgcagcactgaagcagccttcaaccttaactcccaacgtatacctacaaccaagacacgtgggacttaatatttacacagtgactcccacctatcagtgaagatagaaaaaagaaattaggctgtgtcctgggggcaactctctgggaagctggcttgactccacccctccagacccactgtcgtcagtagctgctagtgtgtagtagtcaggggtgagaaccattgccttagtttacctagttgtcccttttaactttcattcatgcattcagaatttatggattgtttatgcatttttatttattgagaattccatacgtaacaaccattgtgttagacactgggaatgctgagatatatagatatattcttttaatatgatgatgttctaaacatttctatcctcagtctcctattcttcttacctgtgctttcccctgggaggtctctgcctctaccataatatcaattaccattgctttgctgagggccccaagtctaaatcttcagtccagacctctaccctgagcttcagcctcacttatctaattacacattggacatactgacttgagtgagccatggataagtcaaacttaacatgtcaaaaaagaaatgttttgacttttcactgaacccactcccatatcctctaagctggtggccccatcattcttctatttacccaagtttcaaacctggggaatcaggcttcctatacttctctcctgcactcctaccccaaatcctctaaatgtggtgggcttgttgtccccatgatattgtgtccatccatacagccagtgcccagtgccctaatttaggccctcagtatttctcattaaggctgttgatgggtctccctgcctctagttggccagttatagtcccaactttaaagtaaactgtctaaatggcaaattgattcatgccactagctttgctcacaagtggagttaaggtccttaacctggcggcacacaatgccttctacgacctggcccttgcctaactctccagtcccaaccagaacgaattactaacctactactaaggctacaacataagatgacttatagttctcctttgctagctaggttctttctcatccctacccccatggctttgctcaagctgtcttcttggtctgtaaaattcactctgctgatgttcattgactaattttattgccattatgctaaatgcatatctcaagtattgcaccattaaaaaaaaagtgcaattacctggttttatttatgtataccctattagatgataaactccctagtgaggatgatatgattatgtttttactgtttcgttacatttcttgaacctagcacaatggctggaacattacaagtactcagtaaatgtatatggaataagtgaatgagtaaagacatagcttcctcccttaaaaaaaaaatctaataaattacctttagcctttataggcatttgtctaaacccagagattgtttcttttctcccaaactcttaacaaagtctcattacactcaaatacaaacaagttaattcagcattgcaaaaatctagctcattttaactttccaagaatgtagaggaatcatgtatattactcaataataaaacaacactcttagaaagcaagagaataaaactgatcctgtggcctctcataatttaatcatttttctgaaaaagttttcagcagagaactgagcctagagtcaccccagtacagaaactaggttatacaatcagcccaataaaatgaggttatacaaacaggctggtcttcaagcaccattgagtcatctgtcagtcccacatttaaaccaaccaacatgttgtggaaactagatttctacatgttataccaaagacatgactgagtggagtggagttttccaaggtaggaattagacattatgcttattagagattcaggtggaaaccactgacccattgtgtaacaaacccagtttgaccttgtcaaaatcctacatccattagtgttttgagaacttgttgattatgcccctttgttctaagttgtctgaactttagttgagcacaaaatagctttcagttattaaaattgcgcttatttatgcacattatttcacgttcatctgcacctgcctagcaaccatcaacaggggccctagaaatattcagagaaccactgaagtgtgagcaacagtttataaaaaaaattgtgcagttctaattgcaaacaaaaagcaagcacgtttcaactatataaaatggatctagaatacccagggaactgctgctgtttataactacacataaattatatttatctttcaagttgaattagtacagcatcacagattgatatgtaaaaccaactaatcccaatatttatgaaaatattagttctaccaactgtttcaggagctctgtgtaacccagcctgtaaaacaaatagaaattaataaacaactttactcaaccctcccaccatgggggccttttcctcctctaagtcatctttctgtctatgaaggaaacagttattcacagccttgatgctataagtattgggaagaaaaatggctttgctttgtccagagacacttggtggtaagaaggaatcaagaagcaaaccaaaccctttcttctgagctttgaccactaagaaacttgatgaaaaatgatgtaggtgattcttatcagggatcatagtcccatttgcctgttccttcattggccacttactatgtaaacaggccagtatggggcactcagcacacaaaggcaagttgggcagagccctgctttcctttcagagacgctccctgtataataggtgattcacagaagcagtcacgctatttggtaaacatgatgatgggggtgtgcattcttcattcactttttcaacaaatattttggcttgtcttttaggactggaacattgttttagaccctagtgaactaaacctagtccttacccttgaattgtttgtaagaggtgtctagacagtaattacacaattataaaatattgatgtggggccaacgataggccaagtgcatgtgagcatcaaggaaggactcccagctcagacttggaggtcaaggtaaaccctctgagatggaccatccatgctaagagttgaagaatggacaagcattagatgaaagagctaggaagtgctgtaggctaagagacctagaaaccagcaagaacatggtgcactataaggattaaaatctacgactgggattgcagcgtgcatcctgaaaagtgtttgtgtggcaaaaaggatgaagagacattcagtgtgggttctggaagtgattacccaaaccttgtacaatcagctattgatcgattactggtgatgtttctttacagcatcccatgtgtcattttggtggatgaacctcaaaaaacatacaacagaattagatcacatggggggaaaaaaaaaaacaaaacccattgctgtcgagttgattccaattcatagtgaccccacagggaaggcaattcaattcatcaaagaagccaccaggaaggagtgaggagaaagcagactgaagtaattaagacttgctggcctcaagaggcaggcccagggagataggatcagagctttaaatcatgtatgaaaatgcctaacccagggcctggcagatctcagcagacagaaatatttaaaaggcagatttattcaccaggtcttaaaagaatagaaaggaacgttcccactgttccccttgagatcttcaatgagataaataaaatgcttagcagtatgctgacccatattaaatattccctaattgctaactactactcttgttattgttatcattattattatgagaaacaaggtaataagtcacatattagtccagagagaagaaaatgtttcttacttaagaaacagtttcaataaatgggatcaagtagataagagaccaaagtttaccagtgttgaccaagggcaggcaggagagaagggaaaacagggactcattgcttaagagacactgagcttctgtaagggtgatggaaaaatttggaaatggataatggtgatggtcgaacaacacgatgaaataattaatgccactgaattgtacctgtgaagattgttgaaatagcaaatgtttcttttacatttatatttaccactattaaaaaaaaaaaaaaaacagttttgattaaaataagaaagctttctaaagggttaatgaagtccaccaggctgagatgtgtacagagtccacctgtcagggtctgtcaccttctagccttatggcaccttcagagacttgtgttgggagggaatatgtaagtaacacaatgtcgttcttaaattccaatttatacaaacagtcttcaacactatgagaggaattcctttgctcatatctaattcctggggctgaagattcgtttgaaaacaacatatccaaggcttgtttgggtcggaacagacaagaccaaataacagatggtattggttacaaggcctcatggttaacattcaggggactgtcattctagtcattgtttgtgtgtttaaatattttgagtgagttcttgaagttctgagattatgtttcactgtgagtagcagtagattattagcttccgagagaatgatcctatatggacccaaataccttctattttccccaaactctctcatatatacaatgcagataaatactccctctgcccactgcaccatttttgcaagtctccttcttttcctctctccctcacatgttctctctctcccaaattcattgcctgtgagagcagcgtggaggagtgactgaatcaccaagacacgcaacatccaagggatacggccggcaaagttggcaagctatgtcataaaaattcagcttggagtttaatcgaggtacataaagttcaatgactttgttccgtagaaagacataaacaaaatcagtaagcatgaagcaaaactcctgctaaatgaacaaagtggttgcaaggacttctgaaatctgcggggactgctgttcatccggcctcagccttcccagcctggctgatcccagctggttttcccagaacaggaatcgctttcccgacatttatcctgtactttctcagaacctatagtggctccttaatgctgctcatattgcatttaaacatccagcgtggaattcaagggtatctacctttagttactgacagtatagagccctggtggcgtagtggttaagagtttggctgctaaccaaaaggtcagcagttcgaatccatcagctgctcccttggaaaccctatggggcagttctactctgtcctgtagggtcgctatgaaccggaatcgacttaacagcaatggatttgggtaaatgagcttatatgacaatatgagtgaaaacacacagtggtagctttaccattattattatccagctgattctgtgtagcagcagttatactggggagggtacaggatagacttggactgaaattcagctctgctctttgctctgagtttccctacaacatgaaatggaggtaaaatccctcttttgagggaatggtgtaaggaccaaatggggaaagcaactactgtaaagaataagtataaactcttccacattgcagataaccaagtacacatacccagtaaaatgacccatatcaggccggaactctcttctaataaaccagaacaccaccgttcaaaccttgtttgcttattcccttctttccaaaaaaaagaacctccttaaaaataattaaaaaaaaaatttaaatatctaaaactctaaacaccctctcttcctatagtaaaatcggttttctgtttatacctgcattcccattgctatagaaacaaacataaatgaatcctccttgtggtgtcttttcatatttgagttcatttgactattcgtttgcaagttcttggaaaggaagagcaatatattccacggtatctgaaaatattttccaaagatggcattttttgtgaagcactttcactctgtaattcaatgggaatatagtgaaattgagcagtgtgtatctttgtcttccagtccttctcactaaccttgatgtccatgcctactgagtattcttcttgtctctgccatcggtgctctcaaaatctcatagaataatgcattctttaagattaagcaataaactgttccagcactgccagggtgatgctgagcaggttgtagactgcacaaaagtgctcaacataaaccccaaagtgtttcatatttattatgactattttctgacgatggtcataaggtctttttccaataaaaaaccatatatcacaaccaactttctaatttgtacaagaaggtgggcgggggggggaacagctttttccaatgtgcatgaaggcactggtcacattggtcttgctgctgaaaaatcttatatgtaaactttctcaggagaatctctggcaagaaggtctaagccaaaggaagagcacttgtagtttcaggcatcagtaatgtgaggagttgattcaagaagaatcttttgagaagtcccatctcaggaagtagcctctctctctctgtgtcatcctgtggggaaacactttagggggctcctgggtaggggatggttctgccagtacttggtgctgctcaccagagagcggcaagagctaaggaatgaattagtttctggccaatattctgccctctggtcctacgtaacagcagaagcatggtcctcagtgtacaaacaaccatgtcatggcacagcaggctctcctagaagagaaattcaaactcaccaagaagagcccctcaatatgaaaaacaagtgatatgatgtaatttggtagaaatctggcacacagatatgtgataaaggattgaatttggtgcattttaaatatgtcaaaggggagtttgttattgaattgtccagttgttttaatgcaaaatagcaatctgaccaataaggcaggtcaatagtgttagcatgaagcatatttcaggaaaaaaaaaaaatgagcataagtaaaagacaaatttttaagaacaggcaaatgtgtctgttcttaaaaatatatgttctggtaagggagcgtgaaaaagatcaaacagtaaaatttcaggtgtgccaaaattgtgttatatgcccgttcctccaaaaagatttttgggttgattgggagcgagacccagcagagaggagatgcccatttggtctcgtgtatctagttgaactaagaagcacgttcctcacgtgtattactttttgttttatatccctgtctaatctttggctgaagagtgggcttcaggaatggtttcagttctgggttaacagggcatccaggggccacagtttcgggggtgcctctagtcagtcttgtctttatatgtaaatttgagttctgttctacatttttcttttgctctgtccgggactctctgttgtgttccctgttagggtggtcattggtgacagccaggcaccatctaaaaaaaaaataataaattttttttttttctgttttattccattttgatcagaaaagatattttgtatgattctgatctttttaaaatttactgagacttgatttgtgtcctaaaatatggtctagcctggagaatgaaccgtgtacacttgagaagatagattctatgtatattgatgggcaaggattcaagctgggaaagcccattagaggtatttttttttttgcattttacttttttccctcatgcatccactgaaaaaagaatctccttcagtgggacaacttttgaagataattaacaaggacagtgtgaaaaacctttaataatatttagaagtagatgtaggagaactaagttaatccaagcatcacattttaaagcacccagtgtgggctcccgttctgactacacagcacagtacagacagacttttatgtatgaaaattaatgaaaaaaggagggatttaggggtctcagtagttctcccaatttaaatacgcttaagtaactgtgaaaactggacagtttacacataaagccatgccaacttaaaacagaaaagttccattgattttgaccacatttttgactcctattaaattgctacataaatatataaagcaggtctgtaatactataagtctgcaaaaaatgtatttttggccaacaaaagtctttccatttttaatctcaatcgtctttacccagtattctttaatatgtaaaaaattatttttggttctaggtattcttgttcccctttattttattccatcttctgcttctctgttcttttcctttgtagacacatacataaaacagtttggaattaatgatgactgtaattttaatttctcaaaatctagctttcagttgttgctggagcaatatctataatgttaaagattaaatggtatccattcatttttaattgcttttccttatgattgtagcctatacaggaaatgctggtttttcccccaatttgatgtttatatcaccaaatataaggatattgctataaaatgctcctaataaaattagaagctaaggtacaatttatctttgctgtttattaaaaatatcccaaaacagttttaaatggaaatgcttaaacatttacgtatgtctacggttcaccacctatctgtgagtttgttgtactgtgggggcatgtgtgttgctacgatgctggaagctatgccaccgttatttcagataccagcagggttactcatggtggacaggcttcaacagagctttcagactaagacaggctcagaagaaaggcctggttatctacttccaaaaattagcccgtaaaaaccctatggaacccaacagaatattgtctgatattctgctaggagacgatccccctaggttgcaaggcacaacacaatagttgcaacaacggactcacatatgccagtgtgtactttccacaatgagatgtatcatgtctgaaaataaagacaatgatcaaaccagttgccgccaagtccatgttgactcatggcgacccctcgtgtgtcagagtagaagtgtgctctctggggttttcaatggctgagtttttggaagcagactgccaggcctttcttctgagatgcttctgggtgaattcaaaccttcaacctttagggtagcagccaagggcgttaaccgtttgcactacttagggattccagagacaatgatagttttgacctaattttaactaataaggccatgtactcaaggaaacctagaaaaatagaatgcgcagatatattctcaaaataatctggtgcccgaactcagaaatatccatcctatgtgttcactgattcctgacattccactattagatctccattcctttgtgtccaggttaaaggcaaatgtcactggaaggacatctctttaatctggagagtgacaggcctagctagctgtatcccacaaaggagactcttcacacttgtttggtccaggcacacctaaatctttggctcattatgaattaataccaaggtctgatgacaaagctgccaagctggagcttaggcacttagtgtgcatgtgtacatggggaacttggtaagatgaactaacggtaaagccaaaggaatgtagaagtagcacttagactcaccgagtatggcctagagcaggaatagccctagacattttactggaggagctaggccaggcgaggaaagatgagaagtgcggactgaggcacgataggagaataggaaaaattgttattaataagggccctggtggtgcagaagttaagtgtttgactgctaaccaaaaggtcagcagttcaaatccaccagccgctccttggaaaccctgtggagcagttctactctgtcctatagggtcactatgagttggaattgacttgatggcaatgggtttgatttttttttttcccccggtaagtaataactgaagttggagagaggtatattcagtggagaaagaagcatcagccaggccaagatgatagccatttctctcaaagagatagggcggcccttaggctcttgtttagggttgcttttttgggagtagacaactatgggtaagtgatgtattcccatggccctggttttgcccatgagggctccacaggggctcttataaaaatcttctgctttgctttccaccttcattaactttccattgcccatagggtcaagtttattaaattccttagcatgccaagcaactccaaacttctcccttcctgcaactctcccttgagtcaactgagcaagtctaatctgcctgtgctttccaaacctccttctctgatccctcaagattcctttcaaggaataagactgggaaactcttcgtgcccttccaggtgggtgccatcctgtcagcctccactatagcctgtacagtttgtatcaggctaagtgaataatctgcaagcatgtttatttacaattcaatctggacagcttattttgacggacggacggtgataaaatgacagaaatccaggggtgtaggaggcccagaccctaagggagaataccttaatttgcagttttggcaaagactgacattgtattgctgataaagaagaccggtccacacagaatgctctcatgacaactgggctcagaatggcttgttttccgtgggtggggagatagaggtgctggtaacaactgaaggaaacttgtttccttttaggtttttgagatgggggatttgcaagatgagagaagcgctggaggtcatacacaataatagtttgtaaacagcgtaaaatataagacaaagctctttggcgacaacttacattttacttactgttgttgttctttgccattgagttgactctgattcatgacagccttaggtataacagaacaaaatgttgttcagttctaggccatcctcatgttcactggtatgtttgaatctattgttgctgctattgtgtcaatccatctcatggagggcttccctcattttctctgaccctgtactttaccaaacataatgtccttttctagtgattggtctttcctaatgacatgtccaaagtaagtgagctgaagtttcaccatccttgcttctaaggagcattctggttgtatttcttcggagactgatttgttcgttcttctggcagtccagggtaccttcgatattctatgtcacatcacaatttggatgcatcaatttttcttgtttaccttttttattgtccagcttccacatgcatatgaggtgattgaagagaccatgcctggccacatttttctattaagaatctcttttgggttttggggaacaggaagaatttcttagttgtggaagtaattaccaacagttaagttttatttcccaataaagaaagatttcaaatccgaagagagcataaccacttatctttgaataactttgcaaaatgaattgtaccacagaaacactgaagtggtgtaatttgttgattgttcttcaaacagttaagaaaggcctgggtcattactaataaagcgagcctgcaaaaattcatttctagaacaagtaacacaaacctaaattcattaggatcgaggcattcattttctaaaggaaatgattaatagataattaaaatgccatgcttcactgattattagtgacaatcagtatttccaaggtattaaaacctgcagaaattgatttaattaaactgactttagcccgcacctcgtaagagccaagttaagtggcctgtggctgatgtgtatgaccacatggtgttttaagttatggcatctatgctttattcaaagtatttagtctagccatcaatgttttattaagttaaaaaaaaagacagaatgtgtagtgtttaatacatgactcttggttcaaaatgactgtaatttcatatccatgtgaaatatattagattttcgggaaagtccatatattgatgtaattccaaggactctaggctaacactagcttgaacagtagatggtacaaactggcttagtcaccatgcctcctaccccccatagctgccctatagaacgcctccattttacagttctcctcaaggctggcctgcctcctgccctcttgacgtggcaccaattcgattaaaacatacatacagacacaaaactgttaggaaggaaagaaaaaaggaaggaaggaaaaaagaaggaaaggaaggaagaaaggaaggaaggagggagggagggagggagggagggagggagggagggagggaaggaaggaaggaaggaaggaaggaaggaaggaaggaaggaaggaaggaaggaaggaaggaaggaaggaaggaaggaaggaaggaaggaaggaaggaagggagatagagggaaggaaggaagggaaggaaatgaatgaaaggaaagggagggagggaagggagggaagaaagaagtgaaggtaggaaggaagaagagaggaaggaaatgagggaaggaaactggaaaaacagtagaaaaagaaaataagtttaatgattaattagattaataaaagatcaaagccttgcatttgcagcaggaatgcagatgtagccttctgctgagtaaaactcagtccaggcagcagacactgactaccccatgggtccccagagaacactcaccttgcagtaattgagctgtacttacagcaaagaagcaaagtccatattcaagctccacgttgccctgccttccagagggctggaattgttcctacccaactcaatgcttttctcccccattgtcctaggaggtggggtgggaaaacttcagacttcagtcttgagcactgtgtttactatgaatccagccaactctttgagtttccctaggtctcaggtccaacatggagagcacttaggagacattcccctgagatgagaaatggggcgtctctgccctacaagctcatacttgactctaaccatatccgttttgccaaaaaggtgaaatcatacatgagcatctgaaaagtacaggagcctgagtcctatgatatagaatgtctatcggccaggcatttaagatgaaataaaggttcctggaattttgccttaacttgccagggaggagattctattgttcagatgtgatctgtgcaaattttcaagttttcatagaaacacaaaagtgtttgctctcaggatcagtgttgttttcctttggggcttgtctgtacacaagaaaaaagagagaaaccaaactaatcctagaaactcctgttggcttcttttaaaaccttgagtggttcccattccaaaccagatttgcccagggatccatttaaaaataatccatttaccacagcattcaaaacaatttagcaagccagggaagaagtctgacagggggtgtgggggtcagtgaatcctgtttcacgtgccccctacacatggtgaggtcactatgaggtccacataaggggctgagatcagggcctattcagaagaatccactcccatgagtgagccttccccagcccctaagctggctgctttgaaatctgctttgcattgtcactatcctgagcaatgatatcaagtatgtgccatctctgatagggcaaaacacagaaaatgttacaactagaatacaaacattccttgaacctcagatcacagaaaacaatgaagaaaaagtctagatttggactataaataacaacaaaagggctaggaacaaaggcctggtggtctacttctgagaatcagccaatgaaaaccccttgaaacacaatggtttgatccacagtctaccatggtgatagcccaaggccaggctgcgtttcattccattgtgcctgggctcaccatgagttgggggctgacctggtggcagctaacagcagcatatacaagtgaggtctactttatagttgctctttgggaaggggaagaaggaagcgaatcaagattcatcagcaacaggataggtgggaacagtctcacaatccttagatgccctaaggggaagggatctaaaccaaagggaactcaaagtcagaccatacctatctttgcagggaagaagggtcctagatttcaggatcctagatttccttagctagtctacatcccccattttataaatgagaaatcgaaaaatctgagggcccagaaaacttaagtgacttgctaagggatgtgcaagccactggggagttagggcctgggtcttgtcagctaatatattctctttttccctgctactgctgagtctggtcaaaacaactgattggaggcaggtctacaaagagggaaggcagagatcccttcgtctcctccattcctacaggcatggagcatagctgatgctaaaatggaacaatggacctaatattaattttgtaatggattttggcacggcatacattttgtgttctctttgtgtgtgatatgtatgtatatgcacatgatatatatgtataccacacacagagaatgcaaaatgtatgccatatatatctgtctaccacccatctgtcagtgtgtcatactgtgggggcttgcatgttgctatgatgatggaagctaaattagtcaatgagaaccatacggatcacaacagaacattgtctgatacggtgctggaagatgagccttctaagttggaaggcactacacaatagctgtacaatggactcaaacataccaatgatcatgaagatggcacaggaccaggtaccatttcattctgttatacagaaagttgccatgagctgaagctgagtcaatggcagcaaacagcaacacacatacacatacatattcaattccatggccatgatgttccttggtagacttatatgatctctgagggggatataatttctcctctcccacactataagcttctcaaggggaggtcatatgccttctacatttctgaactgctctcttctcaaaaaaagtaggacgattaacaaaaactgaacacgtaaggaagaaaatgaaactgacatccaactggtgactgaaaagacactgaatgccctataaactaacaaggaaggtggtagattgtattttctgttcagaattcatcatctcctcccacttctgctgggcttcaaagtgggagaaatatatgccttcaccacttccccttgccccatcatcgacttgggggtttgccatgggacttgtgttaaccactggaacatgggcagaagaaacagcattggtagtcccaaggaaagcctttctgcatgcccctcgtgtgctctgccccccagcatgagaactatgcgctcccaaagagaaggtaagcttctacttgaacctggcttctgggataagaagattgatggagcagacacaatcctgtcctgcagactcgatcaagcccagccaagcccagcagggctcagcagagccttagctaacagaggggtaagggtaataatatgtgttaattattgtaagccactgtatttttctgagttgttatcacagtaaaagctaatacagggaatctctctcgaaagcaaaaatcaccacagagttggagtaccatgaactcacctcagccaagctaagctacataaaaaaacacaggttcttttggatagataatggcatctaccgaagaagttcaaccttgctactgagttataatgaaaagcaaacctcagaccagatttccctgtacatgtgtaaacacttattaaataaacagacagtagcaagcaggcataaaaatggtccttataacatgttgtgtaaactcacggaagtcctagctgtctgttgttttagcattccactggccacgtttcatgaaaggtttgccagaggcagacaccgaacaccccagaggcaggattctgctccctttttaagtaggcattaagcaactaaagctctttgtaacaaggtctgggtgaaggacttacaggaatcaagatgcaggtgccatctctaaaggagcaagctataggccttgctggattgttgttcatgcaaccatcatgattatctttatctatatatataactaatccatatgtatcaaatatgctgtatttcaccaaggaaaccatttctaacatttataaagtcacgagtttcacacataaaaacaatttttgaccttcacgaaacctcaggtatggatagctaataggcaaaatgcttgctgaagctgcccctggagtgtggcctttctgatataatactgattgatcactctgggaaaggggattttcaattagggaatctgatttttcctaaatttgagatttgaaccagctagcacattcataaaattactcagatctaaagtattttgaagtaaactgcagatatcataacatggagataacactttctccctccagaaatatatctgatcatttatacccagtgttaaaggcatttcccatcagggaagacgttgactgtgaaatgctagatctgggatttacacctcaagctaggatcacagcaaaaacataaaacaaacaacaacaaaacataaaataaaatgaagaaatagtggcagccatctctgaaggcccaagcaagaatagagaggggtcacgacccccaaatcaagtagagtaaataccaggcaagaagtcagatgacatagacttggtgtcagagaacagaggacaatggcgttgagctaaagtccatctcagacagaatgttccccatagtcctcccgctgggtggtcagtagaggtcccagggcatcttgtcacacctgtaatgtcctgacaggctgttaaaattacaacacctgtatcacaataattactacatgtgctcaaacacatttcctgtttcataattcttgtagaagtcattcgttggctgacattcaccaagtaccttcattgccagggcactagacaccagagacacaagtgaagtcacagatctcgtcatggagaaggttatagagtcgggcaggggttcttaatctgagatccatgagtaggatccatggatgaactctggtagtttgtgaatgccctgaaaattaaggtgtgtgtgtgtgtgtgcatgtgttattctaggaaagggtctatattgttcatcagatttgtaaaggaacccatgactcaaaaagagtgaagaaatgcttttccatgggaacacctatacaaaatgaccctacatcaaatgtaattactcaatgtttgctatggaagttcaaactgtaagtaatataagaatagacttttaatcaaaatgacacacacacacacacacaaatctcttagacataaaaattggaattgggtaagaacttatttaagaaacgtcctcataaaagaactaatggctactgaaaacactggagctgttataatggaggaatccatgcctcactagtattaaagttaatcacagacccagtaaagcaagggctcaaggttcctttgatatgtggtaatagtaacaactcccaagcctcatttaaaatcccatttgcctcttcatgtcaagtatgaagttgaatgggcacaattaacagccaaggtttaactacctacgacacctagtcggctccattggcctgtaatctgtttcaaacttgagacaatcaatgcacaggttaacagagataattctcactctaactcgtcaagcctctacaacaaagagtatggaagatgccagtgcaattcatggcccaagaagttatgcgctattcatcagtggctgtccgtaactcctgccgcatccctacacgtctcagcttgagaaggaaagatttatcctcaccaagattcagtttcctccatatattaaatggggaataggaatacttaagtcaaaagatttttgggaaaataaaatgtcattaattgagtatatagtataaaaatcatcctccctaatatctagcaggtactattagtaaaacgttaaaatccagctccatcccagccttccatctaggtctatgcatctcaaagcgtggatctcaaaacagcaacagcactatcaccaggaacccattagaaatgtatgttatctggtctacccaaagtttacagaatcagaaaatctagaggtggggcccagagaagtatgctttatcaagccctccatgggattccaatacatgctaaatttaagaatcactggtctaaatctggcccagtggttcagagctacagtgagctatgactgctaaccgaaaggttggcagttcaaatctaccagccactccttggaaaccctatggggcagttctaccctgtcctatagggttgctatgagttggaattgaatcgatggcaacaagtttgtttttggggttttttttagtctaaatcagtgactctcaaccacagctgtacattaaaatcactataattgactgctttgaaaaaaatcgctgttatttgccattgagttggctcctactcatggcaacctcatgtaaaatagaatgaaacattgcccggccctgtgccatcttcatgatcattggtatgtttgagttcatcgttgctaccatggcgtcaaccatctcattaaaggtttccctcacttcctcgaacgaaccacttcagcagatttgacgtccttctctggcaattagtctttcccgaagatgcattcagagtgagacgaaatctcagacaatattttataatccatagagatttcattggctaattttgggaagtagagtgtcagacctttctttctcttcttagtctggaagctctgctgaaacctgtccaccagtggtgaaaatgctgatatttgaaatattgatggcatagcttccagcatcatagcaacacacaagccaccacagtacaaacaactgacagacaggtggtggttttaaaaactgatactcaacccccaccccagatgagtcagaatctctaagtgggggagagtgggcgtgggcactggtagttattgaaaggtcctcagtgggtgaaatagtttcatttaaagggccaaggaagtccactcttctccctttggcagtctgtgacagtgtctgagatgccatcaatgttagtcttttctttgggagtcagaacctgccgtaccatgtaccagctatgggaccttgggaaagtttcctatacttctgtttgctcagtttcttcacctacaaaatggaggtaataataattcccattggatctctctctcttttttttttttccttatgtgagaactgaagtccaaagcctttgtcacttgcccatgtcaaacataatggtagcagaaagaccagaacccagtctctactgtgtcttatgggaatacactgtttctgggtaccccggccactttatgggtgaggagaggaacaatatctggaatcatggagagggtaatgacacattttatcatacctttggctttttttttggcttatgtataggaaacaagggctgacacgtaattgccaagcaaaatgccagaaagaaaggtgactgcagaacttacaggcttcagtagaggacgtgtggggtgagaaggaggatcggcagcagaaaggggaattgactaatggagtgctagacctgcctcaaaaaaaaaaaaactcaaggatgaataaaatcaccagatgccactgagtcgattctgattcatggtggccccatttgaatcagagtagaactgttctatacagtttctaagggctgatttttcagaagcagattgccagaccttttttcaaagtggatggactcaaactttgaatctttcagttagcagccgagcatttgcaccatacagggatatatcactcatattccacagagccattaaaggggcaggtggttaggatccttggaaactccaagattaaaactggacactgtgattggaggagttaggagtggtaggacacagaacagggaaaaaaatatctttgtccaccctggtttggttgggagagagtgagggaaggcatagggccatttagctaatttttccttctaaatctatttgtcttattggtaagggcagcataaaccccgcaatcccttagctgaatggtatggtagtctagaaataaagtagttagctcccagaaaattcaactttgagtttattaaatccattatcttttctttgctctccttcccctgcttcctccccatgacatacacaaacttcagaatcaccatttctgctagaggagaagagaacggttattgtcatctaaggaagattttcaagttaagctttatttgtcctgtctccaagtgttgttcatctactatatcaggggacaaaacactggggaagacgacagctggctctggactatgaccaagcaatggtcatactggtcactgtgttcaggtgtgggcactagattctgctccatctcttctccctgacaagttcttccagattccaaatcccttgttctggccttggcctttgtacttagaaagctcaggctgatgagcttccttctcctatctgtatgtggtcccttttcccaccttctgacatggcactgacgtccatgaatgacctactctgtggtgactttgagtataagggaactattcctatatttgttttggaagaggtaatacagaacaatcaattaattgggcaaaggtacagactgtaacttttccttttacttcttgtaaaacagaaggaactctagaagtagtatttctaccccaaacactctaagacatgtttattggcatttttttttttttaatatcatacccattgctgtccagttgattctgattcatagcaaccctatataggacagagcagagctgtcccacatggtttccaaggagtggctggtggatttgaactgctgaccttttggttagaagctgagctgttaaccactgtaccactagggctccttttagtatcatagaggtcttaaggccatttacagtagaaaactggctttttttgataggtacaccacactataaaataataataatagttttaaaactccatagttgtaactccgacattatgactcattttaaggaaatatttaagatttcaaaattccggtacaaagaaagaaataccctggatatctgccaccttcacttgtgctggagcggcttaccttcagtagggaaggaggtgggaaagaatttgaagaaagcaaatatgagatgcctgtgagcccagagggcatgtctgaggtcagagactccaaggtcagttgtttgtgggggacacacacagagccagtgaagttcaagtggaagccggggtcagtatgaagacaagcacagagggaaaaaaggtccaagccgggcacacactaataggtagggaggatgtggagttcagactggaagtctgggcaaagtattcaggaaggaagaaccaggagagggatgtcttctagcaagggtttaagcttttccagctttagctgtaaggaccagaagtcataggctgatcccttaaatctagcaagattttaatatacagaggttgcaaacaaggtaacaagacaggcaaaatactgccctcaaaaatgcttagattggtcagtacagtttaaaaagaataagccaataaggtcagtgaattatattaatgtcaatgtcctgattgtgatattaccctatagttatgcaagatgctggactcccttggtggtgaaaatggttagtgtgctcagctcctaactgaaaggttggagtccacctagaggcaccttggaagaaaggcctggcaatctacttccaaaaaaatctgtcactgaaaatcccatggagcacagttctactctgacacacatagggttgccatgagtcaaaatcaacaaaatggcaactgtttttgttttgtgttgtttttaatgcaagatattaccattagggaaactgggtaagggaatacatacggaatctcacacctgcatgcaagtctacaattacctcaaaataagaagttctttaaggagtgagctaacctctataaatcagagggtttcacatacaaatcttattttatagcttttcttgaaaaaactggaggatctggcaacacaaggtccaagccatgtttccacatgacaaccatcagaagaagctgagcagcatcgagacaggccattaaaatccttgggtggccacagtttccgtccagccttcttcacttatgtgacttgtgaggtcctgatggacactagagtttttcactcttctgtaaaaagtgactggcggagttgaagacgaggtcgtctgagaagtcatctgagtttgcacaacctgcctggagtttaacatgcatcatgaacaggaacacaaggacacttcactatcctggtacccttggggcctgtgcacataatagatatcattatagtattcctctacagaagcaaaaccatttaagatggggtccgagaaaaatcaatgacatactaaatgtaatgcagtagcgatttccatcataaatcaggagccatataaaatgtagtgaattcttaaattcacaaatactctgaaattatttatgaaataggaactagataaggcctaatttaccaacactggaaatatctattcacttggtttaatgggaacgctccatatatgcacactctatgattcaaagacaaggtgtcattcccaatcgagtctgcctttggttttctgaggttaaaatattttccacattaaaaacctgtcccctttagtttccacatggcaaattactcaagtggaatcattttccccaaaggcaaggcaatgttcccatcatcaggaagccgcaaagggcaaaaaaaagccaatggagcaaagaggggaagatgaattcaggtcatccttattgcaccaaaaatgcatgaagttgactcatgtatttaggtttatctttctatttgttgtgttgcttttttttctatttattaagactctttgtaaaacctataaaatatagcctgctcaaaatatggcttaatctccctaccaccagcttctcgctcttcacatctgctcagatgccagagtttttcctggttaggccattctaagagcaatgctctcttgtcattacctagctaagaagatcagattgccccccataacaagtctattaggggtagactattgcagcaaccaaattaataataaagagaaagcgtgaaatgtttacaaattctttaaggcacgagttaacttttcatgagcgttaaattacacttaaaactcaggggcagatgtagatgtagggaccagctaatggtccctcaagtaacctttatgacaaggattcactgataggattctcccatttctccctggtcttgaactttgacccacaatatgcttgctttagggagaactgttttacaaattggtaaatacacagtccaagctgtttaggtccattctgtcctcagatttattcatttttgttacacaggttaatttgaccctatattacccagtgacgttggtttggttcctattggtaaaagtgggtcattaatgttgccatttgcaccaggtcacagatatctggagttccttgtaaaatgcctgcagctgggactcagctgcagtctgtggccacagatggtggcctgtgcatttagaaaactaaattataaccttgaggtaaggtgttcactctgctggattgaaataaggtgatggcatccaaaccaagtcattttgtacaaaatatggaactggttctcactgtgtggggcatcagctggacccttctatgaggcatctggtgaggccatgagccccctccaagttttcggctgtgtgtgtgaccgccagctggcagagcagctgcaggcctgctcactttgggagccagctgaccatcactccttcagataatgcatttaaaggtcagaggggctctggctctccctccaaacaagtgtgtttggtcaccaggggttccattgaccactggcctgcagaaaatgcaaataatctgcagcttgcttaattaaggcaaaactccaggccccaaggtagagctcggcttcagagtggcatttttatttcttagtcaaataatttgttgcaaccacacgccgcctctttatacacaggctctctttatgaggctcttgaaaaacaactatttcctttttccatttttgagctggatacatttattctgaatggctatatagttatagatagagatatagatcaaatatggttaagattcctagagatgagtttatacgagcaaaaccagaatataactgtaactggtagattgtaaagaatttggtttgattttgagaacaggtgagagatcaatgtaaatgcgttacactaagaaaaaaatatatatatacacacatgtatttttctattagtgacagttctgttttccactaagagatctcaagttcctgtttgaaacaaacatccctgagtagcacaaaaggttaagcactgcactattaaccaaaagattggcggttcacacccacccagaggcacctcagaagtaaggcctggcaatctgcttctgaaaggtcacaccctcaaaaaccctataaagcagttctactttgcacacctggggtcaccatgagctggaactgagtcaacggcaacgacaataatgtcttagacacgcccttctctgtgcaggtgctgtgctgcaaactggttccagggaggaccagatggatgaggactcttcttttacagaatggatctagtgggacgttcactctagtcctcctcttagagcaagcttaggcttgctggtttctaaattcagaaggaggaaattttccacaagtgtttaatagatacaccctttgggtttattttccaggaatcgctcatcagactacagagaaaaactacgttctctggaacaacttttcaacgttctcaaaattagcttcagggtttctaagactgttctctgtactgccttggtgagcaagatcactgcaaatagaaaccaagggcttccaaaagatgccttgactgctctggaagctttgggatcaccccctactgtccgactggcatttcagggaaggagcccggtgtccactttggaggggtttctttggcactgaaggtaatctgtttcgctattatgcaaaaagtttaggtattatcttgaagtggttacatcctgcaggaattttacaggctacttttctgtttctattgcttcacagaattttgattcaacccagactaaccattctaagcgttatatgacacctacttcctgcccctggaccaaatgtgcttgtcctggagaaaactctagttctaaagcaacatgtagtctctgaagtttaacaaaaagaggctcccaagcaagtacagcatctttttattttacaactctttttcttgccaaacgtttggttttgcaggtgtctgagggtggggtaattcttagaattaagtgagaaatgcaagatgtagtaaaagggttgccagataaccctgctttttaaatgtcgcttcaaatgaaaagtactttttcttcttattcttttatgtgaatcaggaaaatatcttgattgttgatatagatagtacattttaaaataaaaacttgcgtttttatttgttttaaagaactgcaggtagttcccttccatctgacttatctggtttttccagttattggacccggcagttggggctttgctcagatcagcccaagagaatccagaagggtcagctctcccggcacgtcatgatttgtgaccaccacaactggcaatttcccattaacctctgattgcctttcccccggaaggcatgcacttctctcccaccaggtgagcccacggcacgctgaaagatgtcacagcatgtaatcaacctctgacccacttccccaggttaattctgtgagctcagcaggtcagtctgccaactggcctgccaactgcctgaatggcggcaggtgtccctcccagcagagaaggaacacagcgctgcacaatgtgggaaatatgctaatccaagtggctgggatgggagccccaggcttggtgacctctcatttgagaggccccagtgtactttttacacgatggagctattatcctcctgggcctccaactggaggattcagaggagaaccacagtgtagataaaagaatgaaaaaatagggcctaggagcaaaggctaaatggcccttgcattatttttgcctggagaagagaaggctggaggtgaagtaggttgagtagggcataatggcagaggagctgttatgtcatgaatgtgaccagctgttcaacatttgaagtaagaaaaggagtaggaaaaaatgaatgtaaactgcaatgtgaacaacttgtttgatatataagtagaaaatttcaaacagggctgttaaacactaaaattggtgatgggaaatacatttcttagaagaactttaaaaacaagatttttttttttaattccaaaatatttaaggcaatcttagctgaatatgagtaaagtagaagaaaatttgaggtcttcttgacttgatggcaatgggtttggtttggttttggctccaattaagtacatgcatcatatgatttgtgccttcacaaactgctccttacaatggatattttctcataggataccattagaagccgctactcagtacttctttgagtgttctttaatcatttggcttagctgagaaggaactgtctttgtggtaaagtgacggacaagtatcttgggagacggggactctgatttcagcgctactgctaatcaaccccgtgactttgaaaaagtactgaaccccaatttccttaactgtcaaacagggacaatagctctttctacttggtaggattgctcagagaaacaaattataaaagcaatgaaaagcacactgaaccgactatgtagtaattaaaccatttagacctctgggctactcccaccaagcatggcgctgtttgtattgttctaataagttactctcaccccagcatctgagtgagaaaaagagaaggactggaaggggaaagggagaaagaactcaaaggcgagctctagctggcatcagggctgctgtttcattcttgcctctcccgggtctacaacccaacattaggcaaaaccacctggcatagcctagtgcaaggcacacacacgattctttcattaatgtggctttgatctctacaccgtttcgatgtttccacagaaaatatttcaccactaaatcctcaagtatcagaactaaagaaccccatcgtccttggtgcttgtaagaggtaacttttaaatacattaaaaaaaaaaaaaatagacaaatacatgcaagtatccctgtgaagcaataaattaacagaaggttttatccctaaagtgggttcagggggagcaaaaagccttgtctagctcaaattctatctacagaaaaatatctttcaaaaatgaaggtaaaataaaggactttgtagacaaagctgagagaatttgtcacaagcaggtctacactacaagaaacatataggaggatgtctagagcactctctgccttttaaaggttgtcatcagttggaacgctgtcctcctgtccataataccttttctcctgctgttgtcagagatggaacccggaccgcggaagacctcactcgattctagaatgttagaggcagaagaaccaactgagcacatctcatcaaaccccttattttccagatcgtacacagaaggtctgagaagtgataactaagaatgatacaattactaggggactgcaattagtccccaaatcttatggccatcaaacaatatgatttactccatttgaaaggccataactgatcttcagtgtcctaaatctggtttgggaacacatttaatttggcccacaatgtggatttaaaaaaaaaaaatctgaattactcgccttcaataatcagcagttattgtcgcatgtactcatgttcctatacagccacaatcagccagagagccagtattttctgccctctttggatgggacatgtgctctccagtttgccacaatcctcactactccccagtaccctgacaatgaggccatgggtgatttagagttcatcatcatgcttataccgttgtttacctttatcatccacttcattcatcttgctttcctgagccaatgaaacatttaattttgcaatcctgtcttaccacatgctgcttctattctcatattcagtaaaaccattcatgcagtcatgattatttttgcaaagaacaaataaacaaaaacccataacgactccatgcgtgcatgacacacacttgaccctatggtgatagtatggctagagcatgaggcacacaaacattcacataggctagaccaggaagccagtttgcacaagacctcaactctgctaaagacccatatgatgtactgtgatattctgaagaagagtaataaccatcttaccatttccctcaatttattatgagttaaaggtggccttccctatcaatgctttctcaaaaattttccagaagatggggtaggtgatcaagttctacaatgatgtaaaaagacacatatgtcccataaaaacttgcacacgaatgttcatagcagcttattcctatcagccaaaaaatggaaacaagccaaatgtctatcagctgagggaaagaatattattcagccataaataagaacgagaggggcagtggtggttcagtggtaaaattctcacctcccatgcaggacacccaggtttgattcccagccaatgcatctctgaccatctgtcaggggaggactgcgggttgctatgatgctgaacaggtagccctttcttcctactctgccacaggcagagtctgggttttctcagactgcaatccattaccttcccagccaggctccaagccttacctctacggaagccagagccaagggtaccaaccagtgacctcagctgggtccacagaaccactgcagccaccccgtttggccccttctccctcagctcttaaatctgacagccacagtcaggccttacctttctctttcggaactgtgccagtgtgcgtctacctgctgtcaatatttaactcccctgtcaaggtacattacatcacctgcactaaatcccaccctagctttatctagagggtgtgcctgctccattcaattcaagtcaaccaatctctgtcgagtacctgcccattcattcatttttttcaacatgtactgagaatctactgcactgggactagtaatgtcgaattgaaagatccgatctctagagtccaaaagaggagacagacaagacaaggtagtcagagtaggaagaaaggtctgatgatctacttccgaaaatcaccaatgaaaaccctgtgactcacactgttcccagtgcacgtgggttcaccgtgagtcaggggctgactaaacagcagctgacaacaaccagcaggtatgaagttccgacacctgctacaacatggctaaccttgaaggcattatgctaagtgagagaaggcaggcacaacaattgtattgtacgattctttctatatgaaatgtccagaacaggcaaatccatacagacagaaagcagattagtggttgcctagggcttggagcattgagaggaaatgaggagtgactgctaatgggtacagggttcctttctgaggtgatgaaaatgttctaaaatggactgtggtgatggttgtacatatctgtgaatatacgaaaaagcattgaatcgtataccttccatgggaacactgtatggtatatgaattttatctcaataaagctattacacaaaagataaaatagattaagtcttttgaaaatagacaagggggaagtaatattttggggggacctgctatgagccaggcagactctgatgtctttttatatatttcattcgagcctcacagcaacctgccagtgggttttactctgtccatttcacagatgaagaaataaagcctcacagagattaggctgcatgaacagtcacttgttaagctgagatatgaacccagacctgagtaccaaacctcttctgtcatcatgttacctctcagcagtccccagcattttctccttccctagacaacaagtaaaggaactcaacagagacttggcctggctggttcttacgactgcatgtaaatattgagctgtgggaaggacactagctcttttcttcaaagctaacctgagacatgccagctgattctcgtctctctcagttccaatggggcccttttcctcaaggtgacatccatccttttctaaatgcagaactagacctgcctaaaccatttctctgtctgccgtctgctggcattttctcacttaaccaatattctctttgaactgacctcagcttcttccctcattagatactagagctgaaaacgttgtctaatgcaccttgtcctccccactcccctgctgcatatataaggcacaatccaggtagcactgaacacactaatgtccttaaaattctattgctgtacctgtctttaatcattagcatcaaaaagtactcaccaatgaattcatatggacaaattcctcaactaagcattcaaaacgcatgcactagcatgcaatcccaatcactttaagaggttatgttaagtcattggcgggggggggggtatagcagggtgaggggaaacagttgaaatagaactgatactccttgcctcaaacaaggatcagccagaggtatatacaagtagccagtcagcagagagcatctgggatgcaagccatctccaatccacaggcagagtctgaatttgctcaggttgtaatccattaccttcccagccaggctccaagccttacctctacggaagccagagctaagggcaccgaccagtgaccgcggctgggtcctcaggaccactgcagccactccatttagccccttctagcctcagctgttagatctgacagccacagtcagcccttacctttctctttcggaacagtgccaatgtgcgtctgcctgctgtcaatatttaactcccctgtcaagtttcattacatcacctgttctaaatcccatcctagctttatctagagggtgtgcctgctccattcaagtcaaccagtctttgtcgaatgcctgcccattcagtcattttttttcaacacgtattgagaatctattgcattgggactagtgatgtagaaatgaaagatccaatctctggagtccagatgcagagacagacaagagaaggtggaaatgccactgagtgcaggggagtctcccattccaggctggctgaggagagatggactgaatggaatcagagaattcccaaagatggcagcattcacagtgacatctgtaacggctagatccggaaaggatgaagaataaatgatctccgtcctcaagaaagaattcctgggtggagcaaacagttaacatgttctgctactaattgaaaggttagaggttcgagaccacccagaggtgcctcatacgaaaggtctggtgatctatgtctgaaaaataagccattgaaaaccctatggagcacaactctgctctgacacacgtggggttgccattagtcacggttgactccatagcgactagttcgttcctcaggaagcttacactcaacaggaaacactatcattccacagactagcaggatttcttaaataagtgccacaggtgaggtacagaatagtacgccaaaagggcagccacctttccttttttcttgatgagttgggtcacactaatttctaaggaaggatatgtgaacaaaagtttctctacagaaaaagctacagtagatagatctgtcggtgttatgatcaggggtgctttctcacaggatttaaaacagcagataacctagtgaataaagcaatcgcctgggacttatcaagggcaggggaagaagaattcaggtgacagggtagcattcttccttggtgaaaagaattaacctggggcaaacaggcttggccaaaagtaaacaaggatctgtcacaggctcctaatttccgcttgactttttcactacaaaatttcctggcactaaatgggctgctgatggctcttttaaataataccgacaaacttgcagagccactgggcaatgcaaaaacgggtttctttaactacatctgggatcggaagcctcaaaagctactctcttcgggactttttaaaagtttgagtttaccaccaaaacatggttctcaaatgtacccacacaatcccttttctacctaaacttacttcagcttcatgctccagagaacaaagaccaccatttatgcctgaacattcaaaggaccccatcacaggggagcctaagaggcagccttggaaagcagtggtatatctgaattgcaaaacacagccctgagttctcaatacatcttatttggtctatgtttccagcagctctattaagtcagtatctcaggcaattttcaagtcccacatgtttacttccacaactgcttctcaaggcgaacatttatagtctgttgcaatgttttactacacgtatttagggttttgacaaatactaactgacatggctaccattccagggaaagctgatgacccatatctaacgtcgactacttggtcatggctcaagacatttttagtcagtcagtggttagaagcagaatgctgctctagaaatcctggaagcacagtttgatttcagtcccttaaaaagtcttcattgcatgctgaattatcacaaaactgaactgaactggagttttactgcactcgagctatctctcactctttttttttaaagtcaagagtttttcagaaccttttttgcttaataacacataacacatttggtattaggaataatacacattattaatggaacaactgctactactaatttccaaagctcagggatttctggatccaattagaatggacttgtgttatttatcttgtaatcccactagaaggatgaggtgctgtatgaccttcatttgtttttaaaagctattttagtaaatttgaggtaaatttttctaataatataattagtaccacaggtagtgagataacaaacatctcatggaaaataaccagcaaatatgactaacatttcctgaggtaaaccagaaagaactttaattttcaaaagacagaacatttaaaatgtatttgttactgttgttagttgccatccagttgattccgactcatggtgacctcaggtatgcagagtagaactgctccatagggttttcaaggctgagacattttggaagtagatctcctggcctgtcttcggaggtgcctctgggtgggctcgagctgcccatcttgcggccagtagtcatgtgcttaacgatttgtgccacccagggactccttaaaatttattaatttcattttaaattaatttaaaatatttattccatttatgtcttgtgtacccagctttacaaaagtaggtttttttgtttttaagtaagaagtctcaaagagaaactactaaacaaaactaactgcccaaaagccaatataataaatatccctctgctttagaaggcaagtgacacggtgtgctcgtcatgaaggaaaagtatagaccaggaacttgaggccttggttagtgttatatgaccttggacaagtcacacaatgggcaggtcgccttacagttagggtttacctctgccagacctacctcttgtgaggcgtgactaagaaataggttgattgttgagggtacacaccaaactcatgtgtgccagaggatactgtacattttagaacagccactttggaggcacttgacttatccaaggtcacacagaagccactctaatgctggcttgtcccgaactgacggttttcccaggaagtgtgactcattgctaactaacaccaggaaagtcctgggcaaattgggacaagttggtcactcaacctcctcaagaactcagattatgttagaactttaccttgggaattgaagtcatgttaacatggtaaattattttgcatctgctctgagccaacaaattctaattctttagaattcagttgcctttttgaaacaatatcatcacatccaggcctaatatataatatgggttttcaaggtaggtgaaaagtttgatgtaaaaaaatgaaacgtgtccataaatgataaagatttattttttgaggggctcatcaacaaaatcccaaaacaaacaaaaatcaagaaggaatttgtaactttgctacgcaaggagtggtccacaggcctaccaacactgacatcactgggagcttgttagaaatgtacaatcccacccaccccaggtctctggaagcagaatctgcatttcaataaaatccctgggagacttcaatgtactttaaagtttgagaaaccctgttttagaatttaagcctggggtaggaaaggacaaatctgtattaaaaaagtttgagatatttatgaaaataaaaacattcttacaactcaaagcactctgacaaagaaaacaaaaagcattctcataattttttttgaaaattttaactttttagttgacaaggccataaaacttagctaaactctaaatgaggccaatgattagatggtttccctataagaaagccctgtaggatgccagcaccaccttcaaaggacagcacagtcagggtctatggggcttccctctgtgtacacaacacattcaaggacctctctgcccagcatctacctgagtcgggcattaaactcaggacaactcctagatttttggtttcagtattgttgttatttgctgttgagtcgattccaactcatggagactccatgtgttacagagcagacctgctccatagggctttcttggctgtaattttatctgaagcagattgccaggccttttttcctgcagtagtgctggtgagttcgaatggccaatctctaggttaatggtcaagcataaaccctttgcaacactgaaaaatcaatgtgcagggaaaggatggagaaagagaacaaatttccttttttgaattgtggtaaatttatatgtaacaaaatatttgccatttcagtattcttcacatgtacaattcagtaatgtcagttatgtttatcatgttgttaaaccctcaccattacctgtttccaaatttttccatcttccttaacagatgctcagtgttccctaagcaacgagcccccttttcccctccctccacccctggtaaccactagtaaactttggtctccgtacacttgcctattctaatatttcatacaagtgggatcatacaatatttgtccttctgaaagagtaagtttctgaagtacagattaagagttctattttggaatgcaagatctgaaggccctaataaacacctatgtggaggtggagtaggtactggtatggggctaagagacctggtgacacagtggttgagagctagggtgagctgtggttgctacccaaaaggttggcagtttgaactcaccaactgctccttggaaaccccatggggtagttctactccgtcctatagggtcactatgagtcggaatcgacttgacggcaatgggtttggtttttttggtttagtacggggctaagcaagttcgaaaatatgttaacaagtagtatgttcatgacccttctttgtaaaataatttggggaatggtcagcatatggattgtattaggtaataaggggctgaggaatccaaggggagagcatttcaggcctagggtatgggaactaatggcgtggtgaaaggaagacagagggcaaagaaaaacagttctgataagcaaagaattaccaaaaaaaagtgaaattaaaacagatgacaatgacatatagtgaattacaataatataaaggttaaaaagctttcctgaaacaaaagatgcatatacagtagaaatacaataatagtctgaaactaaaattctaaggtattttaaataggaagccagaagaggtgtgactatggagtttttatttatctgtgtgtaagtggatgttttgcaccctacaatcagaaaattcatagtcttcttttacgcccacttacggaaagtgattatgtatatggtcacaagaaaacactgataattcccttaagtgtagactctgcaggtcccgatctcaaaccataaggtaataaaactagatacaagcgaggaaaagacaaacacatgcacaaaaaaaatcaaactgcttttaaattgagaaatattttgctaactaaaccaaagaccaaaaaatgcaattcaaaaataacaaaaaaatagaagttacttggtcataaatacaatggagaacatttcatatcaaaactcaaggggagcagcagaaccaagaagaaaattaaaaaatacaaaccctctgccgtcgagttgattctgactcattgcgactatatagagttctctacggaaacagactgtcgtatctttctcccaaggattggctgatggttttgaactgccagcctttcacttagcagttaatcactgaaaccactgtgccaccagggctccttaagaagaaaatatatagccttaaacaagctttcaaaaaatgaaagattgacaatgaattaaatattcaacctaaggaaccaatgaatttaagaaaacaaatatgaacaaacaaaagaacttaaaaaaggggcatagcaaaaaaaaagaaaaaaactaaaattaattgactattagtgaatttatcaatctaacaaacattgagtattgagaggagcttagtttttttgctttttttttgtttgttttggctactgttctggattcactggatatggtggtgaatgaaaaagataatagatgaagaaaaaatgtaaatgaataaataatttttgtagatactctgctcagaaggagaatgcagcacaatcccctactccttaagtgtgggccgcacacagcaacttctttccaaagagtgcagtatggaaaggggaaaatgtacctttacagtggaaaaacctgacaaacactacctcagccaggtgaccaaggtcaacattaatagtcataagtcatgtggacagtatgtacccttgatgtgatatggtaaaaatagcattttacttctgtggtcttcctccaaagaacccataatcccacctaatcatgagaaaaatatcagacaaatgccaacagcagggcatcctacaaaacacctgaccagtccttcccaaaactgtcaaagttattaaaaaacaaggaaagtctaagtctgagaaactgttaaagccaagagaagctgtcaaggctaaggagacatgacaactaaatgtgatgtggaaccctgaatggggttctagaatagtaaaagggcattaggtaaagactaagaaaatctaaataaagtacgatctttagttaataataatatatcaatattggttcattaattaggacatacgtatcatattaatgcaagatgttcataacgggaaattggttgtgaggtatatagcaactatctgtagtatcttttttgtaaacctaaaactattctaaaaaagagagtctataaaataaaaaaaattagaggataatttcagatagtcatgcaaaccgtaaagaacataaaatacactaatgggatgggaagtgctaggatgggagggtgtcaaggaaagttgcctctgaggcatttaagctgacacaatactgggaaagccagtacaacctgtacaaggcaagggcacggcagctccgtggatacatccaaactacctgagggaccgaattactggtgtggggaccatggtttcagggaccacctagctcaattgacataatatagtttataaagaaaatgttctacattctatggtggtaagtagtatctagggtcttaaaagcctgtgagcagccatctggaatacgccactggtctccccccatcagaagcaaggaagaatgaagaaagccaaagacacaatgaaaagattagtccaaaggactaatggaccacatctacacggcctccaccagacgtagtctagtatagccagacgttgcccggctaccaccactgactgctctgacagggatcacgatacagggtcccagacagagctagagaaaaatgtagaatgaagttccaactcaaaaagaaacaccagacttgccagtctgacagacactggagaaaccctgagaatatggacacccttttggcttggtaatgaagtcactcctgaggttcacccttcagccaaagattggacaggcctataaaacaaaatgagactaaaggggcacaccagcccaggggcaaggactagaaggtaggaggggacaggaaagctggtaatagggaacccaagtttgagaagggagagggctgacatgtcatggggttgttcaccaatgtcataaaacaatatgtactgtttaatgagaaactagtttgttctgtaaatcttcacctaaagtacaataaaaaaaaaagttagcaaactgtattgagccttgtaataataatatactagattctagtttataaggatgaatcaacattaaaaaaaaacaatcaattgaatttgtgctgacaaaagaaaatatgtgatatcattagatgctgaaaagtcatttactgaaattctggaagaacccttcacttaagtaaagtaagtgtcaaaagaaacttcctaagcacgagaaagagtatttgctagaaactattaaaaaatatactcttattacagtcacaaataagataaggataccctctgtcactactgtacttttcaacattttagacctcctacaagatgttatacaatgtgaaaatgaaagacatggtacaaatacagcaaaataatatttaaaaacaataattacttatagatttttatatatttgaaacattcaagaactataacttaatctctttaaaaattaagagaatatattaaggcaactggaaaaagataaacaaaaaaaagtactgcttatttatactatataataataggaaaaaactgaaagaaaaatctcaaactctgataaatgggataaattttagaagagagtttataaaagacctatatgaagaaaatgttaaaaagctatatataaaaaaatgagagaaacatactaataataggaaaaaactgaaagaaaaatctcaaactctgataaatgggataaattttagaagagagtttataaaagacctatatgaagaaaatgttaaaaagctatatataaaaaaatgagagaaacatactataaaggaaaaaaaaattcctttttcattagaccatatattcaggtttccagctctgccaagacactttagaggaggagacatataaaactagagctgctttttgtatagttagattattgtgttttcagtgaaggtttacacagtagtttaggtttccattcaacaatttctacacaaatgttcagtgacttttgttacattcttcaaatgtgtgaacatcctcatttccagtctggttgttccatttccattaatctagtttccctgccccctaacattctcacctttgttttgaactaattgttgaatgtttggtctcatataaggagccctggcagtgcagtgcttaagaactcagctgctaatcaaaaaattggtgattcgaacccaccagccactccatgggagaaaagtgtagcagtctgctttcataaagatttagagccttggtcgctttgagtcgctatgagtcgctatgagccttcagtatggactgtacttcagcataaagaaaacaaaaaccctcagaactggaccaacgagcaacatcatgataaacggagaaaagattgaaattgtcaaggatttcattttacttggatccacaatcaaaagccacagaagcagcagtcaagaaatcaaaaaacccattgcattcggtaaatctgctgcaaaggacctctttaagtgttgaagagcaaagatgtcaccttgaagactaaggcgcacctgacccaaaccatgatattttcaatcgcatcatatgcatgtgaaagttggatgatgaataaggaagacctaagaacaactgacacctttgaattgtggtgttggagaagaatattgaatataccatagactgccaaaagaacgaacaaatctgtcttggaagaagtacaaccagaatgctccttagaagcgtggatggcgagactgtgtctcacatactttggacatgttgtcaggagggatcagtcctcagagaagggcatcatgcttggcagagtacagggtcagcggaaaagaggaagaccctcaacgaggtggattcacacagtggctgcaaccatgagcttaagcataacgattgtaaggatggcgcaggactgggcagtgtttcgttctgttgtgcatagggtcgctatgagtcggaaccgacccgacggcacctgacaacaacaacaacatgagtcggaactgactcggtagcaacaggttttggttttggtctcatataggtgttttttttgtttgtttttttttttttaaaggagcacagtatttatgggtgatattcattattttgcgagccaatctgatatttcgctacagggtgacctcaggggttagtttctgttcaaggtttgaagagtatctcagggcagtagtctcagtgagttccccagtctcaaccagtccagtaggtctgtttttttttttttttttttttttaaggaaaactagtgctgcttttgagagacaaccccagaatactgaaataataaattctccagaaggcaaatatcaatagaaccctggttttctgccaagttaggtagccacactctccatgtctcatatatttaaaccagggctttgaactagcatcctgcaggtttgaagccttgctgagaatttgcatttctaccccaaatatactgaataagaatctaccaaaaaaccaaacccattgccatggagttgattccaactcagagtgaccctataggacagagtagaactgccccatagggtttccaaacctgtgatctttagggaagaagactgctgcatctttctcccacagagaggttggtgagtttgaacctctgacctttccgttagcagctgaatgctttaaccactgtgccactagggctcctagaagtggagagagatctatttccagggtccacatctaggaagccctgaagactgctgctttgatgaggcctttgtgtttcatagactcattcttgaggaaagcattctaaagttattggaaatggcagtgagatgtccgctgttccaaggttagtatgtggctttacaatgtctgcgtagacagagaggaagagagagcaggataatctggtagtgagtggtcttctgatagacccaggtttgtgttttgtgtgtatgtgagaggcttaggatccctgggtggtgcaaatggttaagtgctcaactactagccaaaaggttggtggttcaaacccacccagaggcacctcagaagacaggcctggtgatctacttctgaaagggcacagccttgaaaaccctatggagcagttgtactccgcacacacggggttaccaggggtcagcagctaacaacagcaacatacctacctaaacctcagaagccaatgctgcttcgtgatactgatatcaagtgagggagcggggactggggcgatgccgataaagaagtaaagagaaaaccagcttcatcattagaacaagaagcaaggaataagttttctgttggcatgaggaaaagaatgaaatccatttctgtgaaaataagaataaagaagtcaaaacccaaggaccaaagtgtggttagtgattcataacttttttaaattgcccttaaaagagagggtcctgcctagaagagataaatctgtttcccactgagatatacacattcaccaaacacttggatcagacaaacacccaaatccctggagtctgtcattacatcattccttaacctttgcttcaacatctacaaattaggtagaaaagctaattgtctttacgtgcctattatgttgtcctctgtcacaccaagcgctcattaaactttgaagagggaacattatagagtttacagtcgaactgcaggactaataccaccgcattatccgcatcatgcaacaaacttagcatcattacagtttcatgagatatagtaaaaattgctcattaattattcatattctgtttccagcacacaggattttaaaaaaaaaaaaatccacatgagaagcggaaatgtctgttatcctgaacagttaggtcaacgaaagattcagctgagcttaaaagcgttgcctttcagatctcctaatggcattgactgctagagtgttttgtgagttccattcctcccttcctacctgctgctcaaatgttcccctagccttttgttgctgtcaagccacagataaactcaatctcaaggttatccaacctgcaactgacagaaaaaaaaaaaaagtgacctccaaatgcaagcctgtcaagcagcatgtttaagacaagtctttaaacaatccaactgaccccctcaatacctggccataaagatggcttgttaatgtcattaatatttaactctcctgccagactataagctccatggacttggtaacaagtggtaattattttgttcatcaacatagccccagagcctggcacatagaaggcaatcaataagtatttgtgttgagtggatcatataataagaatctctccacactttgcatctgaataatgtcctgtcaaatgaggttattacaatttctttaaccatttctgcaccgttggacattcccgttccttctaatggtgtagtcttgtaaatgtttctgtgataaacatctttactcatgtgatttccccctattttggattcccaaaggttgacttaatgggtcaaagaatcatgatatttttatggctcttgttatatgtagcgccaaattacttccagaaagaatgaaccttatcaccagaaaacatggaagaacaagttttaccacttgcctaggaataaatttaactgttaatgcttttaaaaacagtgcataacttaaacacaaaatgctgtgtcattttttgggttttaatgtgaatgtctttaatttggtaaagtgagcatttttctggtaacttaactagtggcattttctctttggggcatctaccaacggataatcagccatggcaaccgcttctggtatgggagtcttccttaaaaacttaaaagaaatttggccccataacttctctgccaatttcattgcatttattttgaatcattctcaaggatataataggaagtctgaaagctggagtttagtgatgccactactggccagggatctctttactaaatggacttaaccatagaccaggagcacctcaaacactcatccaggattatctgcatgcatgtttataaatatctccaggatgtttcacactgaaaagaattagcgagctattttacagaatctggtctgttttctgggccgataaataatagcatcaataggtcaatcaggtactagcccacacagagaaattctacaccaacaaaagtttcagtggtaatgtaattggaagctgtcaccaaaacctgttatctgtctggatagaaaactactcaccaatatactgatagcccagaaggtagagaattgaatccagaccaacaaaaccttggagtgtataacagattcaagacaatagctgagtgataaaataaaactttcccagagactcaagtcttaataaaattgctctgtaagtgctctggggcaacctgtccatccaaacacttcatgtttgtaggtttcaggggtatttggctttggaagcaggcacatttatggttgtgttggcaatctgggaacttcttgatgaggcccaaggtggaatctagtttgtgtagcccagccaaggctagtattattgcgtaaatatttacctatgaattccaaaataaatactctctcattgtcctaggtactcattactttaaacactgagaatgacagattccaagaatacctataaaaaaatatttcagatttaagaggtcaaaaattctcaaaggtatgctttgtatttggctggggaagagtggtagaaagaaaggctacttgtcttaaaaatgccccttttcaagaatcattaatctatgaagagctaaataccaatgacaaataaataaccatattctataaataaattaatttcaagggaatgttttctcttcgtgcctactggagatcaaaactaagaaggagagaggaaggaaagtatagtggttaagaacatagactggagccagactacctgggtccaatcccaactctgcctggacaagtggtatgacttgtgatgtgacacttaaattctatgttcctcagtttcctcatctgtaaaatggggctaataatgaaggtacctacctcatagggttattaggacgtaggtaccagtttatctagaaaagtgcctgacctatagtaccatgtaagtatattccattatattataaacaccttgtgagtatggtttatacaactgtatttcccagtacccagcatcactccagcacgtaacaggcaatcaataaataattttgatgaatgaactgttaactatgaaggattttctaataggattcctttaaaggataacatttccttgcatcttcaaaaaccaaaaaccaaacaagttgctgtcaagttgattctgactcatggcagccccgtgtgtttcagaaagcatgatgtaatcagtacaggcctgcagacagcctgtgtgcctcagcagaatgaataatgagacaaccgtgaacgacgttaaagccggaggactagaggagaaaagtaaaaatcttaaagcaaatccgaatgactttaaattgcttcaagtattagtttcttggcatagccctggcctgttcttctattccttcctgatagagcagtgactattacaccatctgggatggggaaggaagaactggacattctgacctcatctctacattactcctttattgaagtgggggctgagaagtaggtgggaaaaatttcaatgaaagattttcaaatgacacagattcaggaacagagtgctctggggctggcacaggcctatttaatctccaggacatctgaatcaacacagtatctgtaataacttcttattctggaaaatctcagagtcattttcattttttttttcttttaatctatgtatttagtagtcgcatcactcaccactgaaatgcaattcttgtttctggagtaacagagagcaatgtttttaatgggtactattttttttttatgagacaataagatgactagatacacagctcacattattgaaaaattccagaaaaaacgcagacagacgggcttaaccaggttgaaacatagccaggttctatagggctccccatattcaaggtgtggcatctccagttccctcctgggacagccattgagaaaaagcatgggtgagtgagataatgagttaatgattaaatgaacagatgcaatgaagctgaagagaaggtattgacctacaaaaatttaaattgaaaggggcagagcctttcccatgaatcaaatccactgatgaactgggtttaattttaaaatcaacatgtggctaaacccacccactgccatcgagtcgattctgactcatagtgaccctataggacagagtagaacatgtggctagtggctaccatattggacagcataggataggtaagtccttttgatacctctttggaatccatggctggtacaaatggttaatgctctcagctgctaaccaaaaggttggcagtccgagaccacccagaggcacctaggaagaaaactctagcaatctacttccaaaaaaatcagccactgaaaacccaatggagcacagttctactctgacacacatggggtcaccatgagtcgaagtcaacctgatggtgactcgttttattctttctctgtctccttgacgctgttctcttctctcacctgccattaaatctcgggtctcctcattgttctatccttggcttcctgttctgtcactctgcatactttccaaggctgtcattgagacatttcacattctacatgaccaaaacataacttgttttcttcccacatagaacagcgactcttcatgaatttgttatttcagttgaaggtgcaacaacaacacatccagccctccaagcaaggagccctccttgaaatctcaccctcacaccctccacatccaattaattagcaactcttgtgacattcaccttaaaaatatctttttcagattctcccctaaagcaccactaccattgttatacgctcacctatattttagcagtcttctaactcagggattctcgattctggctgcacattagaaccacatgggggaatttaaaacattcccagtggctagatccaccccagaatgctgacctgttcaggatgggtggagctcaggcactagtgttctttaaaactccccaggtgacttcgtgcagttagtcacaggaatcacttttctggctaatctctgtggctctagtttgtcccccctatggctgtaactcaccgaagcaccagggcgctcctgaaatgttcatctgtccccagcacctctgcttaaacccctcattgatggctcataattaataaaatcaaatccaaatttcttcactttccctagtctttccagtcatatcctgatcttatctgccacacatcaaagcgttgctagctctccacctaaaacacgccctttcatacctgcactcactccagcttctctgcccagcatactgatctctactttcacctgggagcacccacttatccttacagactcagttccagcatcacctttctaggaaatctgttctgtcctaagctgctgggcaccactcctctatgcatggtataccctgtgcacactccagcagtatatttatgatattataaaaatgtatatacgtacccatattcccctctagcctatgagccagttttctcagggcactcatgagtcatgcctgctgtcaccttgtaattattaacaatgtccctttttacttttgaaggtgtcctaacatggatgataaattagtggttactctacctgtgaggtcgctgaggtcataacactgtaatagtctttgttgtaacctcaatgcctaatgcatttcctcaaacttggtatctatttaatggatgcttgctcataaaaaagaatgaaggaagtaagaaaggaaaggcgggaggcagaaaaagagggtggatataactggtaagctatcatatcagccccagatgcgcgtggtaactattaagaaggcctatttaagaagaaactggtacatatctactccttaaaaatatgattttagagagtaaactcaagtcttcttccttaggttaatatcactttttgtacttttgtgtgttctcaggaccctagagacattggccatcgggtgggtaaggaccaaagtatagaccattcgtgggaacagcccccgacaatgtctgttttaataagagcaggtctgctttccctggccaaagagcctcgctctggtgtgagactgccttcgtgtgacttgtgttcctccactaggaggaagcgtgactttggtaagtcacttggactctttgaatggagcttccagacaaagatagactagggagaaaggcctggtgatctatttctgaaaatcagccagtgaaaatcctatggatcacaacagtctgatcccattacacatagagtcaccatggctcaggaatgacttgatggccactaacaacgacgacaaagcttgctttataatggaggacattaatggtgcctaacctattttagaattaaagaaggaaaattatgcagagagtttagcatagtgtctgccgcccctgaattaacagtggcccttttaatctattttacttgttggacttaacaatacttcatttgaagaagggatttgcctgcctttaaaagtcctttgaaaaatcactgttctagaatgctgtaattgtagagattccaacccagttctccctggggatctttgtaacttgagttgctaatggaccagtgttatttccttaccctgcaattcagagcctggaatcttcaccttgcctgttcactagtgcccaagagtggaaaagaaaacaccagcccaggactcagatttcagtgtgagccacaggtgcagatgggtgccagcttctggcagcatggcataaagagaagtgagtgctcttgccagtgctggtaatattactacagtatgcctatgacaaatatttactttattagctgaaataccacgggacactagtgtttctgtttgaacagtgctttgaggcagaactcattgaaacaacatggaaagctttgcataaaaaaactcttttaagattctacttgtaacacgccatgccatcagacttgggaggacaaaataatcccagttatttgcatataactccagttcccaacacagatctgtaggtaactgtttgcataaagcataatggaggatatttcattttgacaaaatgggcctgtcaaccaggatgggaacagcaggataatttggaggttatagtttaggggttacagccaatatctttggagtcaggtggtggtttgagaaaataaagtatttagagtatctgggacctaaaagcaatgcaataaatgttaactctgataataataatagtaaaaaaaaaacagctactgtagaatcgattctgactcatggggatcccatgtgtgtgagagtggaactgtgcttcatagggttttcagtcgctgtttgtttggaagtagatctcctggcctttcttctgaggtgcctctgggtggactcgaaccttcatcctctgggttagcagccaagtgcatttgttaatcatttgcactacccagggactcctaagccagttgctgtttgagtcaactccaattcatggcaacgccatgtatgtcagaatagaaccctgctccatacagtttttaatggctgatttttcagaaacaggtggtcaggcctttcttctgaggtgcctgagtagactctaacctccatcctttcagttagcagctgaacataactgtcgtttgtaccacccagggaagtaattactactaatattagtgctattctcgaggagcatttgacacaattctatcacacagagttgactgcgttgtcttttcttccattttactgtcattgctgctgtcgtatgtaattttaaaccaaccacaagatagtcacacagatttaaaacttagcttcaatgctttcaacttgctgtgaggagttagaaaatcaacgcagttatggacaatgagattaaggtgtctgcattttcatgaccagagggcaagataacttgtcctgaaactgtttgatctcattaccatttttgctgaatcctttgagtcccacaaggatatagaatggcttttattcaaaagcctccaaaagagagattgcatcgacagaaattcagagcaagctgctgaaaggcgctattaatcctgatccagggatattacatgaaatatttgacaggaatccaaattttcctgtagccttccactaagaagataatctttcataattttaaccgtgaaaggggaggacttggtcttttgaaatggaaaggttgtgtctaattgaatttccttctttggtttcttattaaagatgcatccagattgaatcatattcaattaatgatggcacttgacatcttgctctttcagaagctgaaaatatgattagcaaatctagaaaaagatgtacggggcaacagtgccaattcaacacttaaagggccaggcatataaaggcctatttcagtgccatttatttatgtgatctttaaataggctaggccattgttcttggccaattcaatgactgagtgcaaaattgtattatattaaacatcatccatgaagaaaaaaaaaaacatataaatgctgcaagtgataatcagaacacaccattctggccggccccctctctgactctctgtcaaatataccatgatccttgccattactgacctcagtgcacacctgtaatgtacttatgtcagctcacccagccacttgccagccaccgagactcaggttcaaggctttatgcaactctggtaatgacataatcatgttttactgattgtgagatgagagctgataagtaaaagaaatgtatatagggacacaattacaaccctgatgcacacctttcctggttttaaaccacacagtatccccttgatctgtttgaaagactgcctcttggtctatgtacaggttccacacgagcataattaaatgttctggaattcccattctttgcaatattatccatgatttgctatgatccacacagtcgaatgttttagcatagtcagtaaaacacagataaacatctttctggtattttctgctttcagccaagctccatctgaaaacagcaatgatatccttcattccatgtcttctgaatccggcttgaacttctggcagttccctctccacgtactgctgcagccggttttgaatgatcttcagcaaaattttactccatgtggtattaatgatattgtttgataatttatgcattcttttggatcacctttctttggaacaggcacaaatatggatctcttccagttggttggccaggtagctgtcttccaaatttcttggcatagacgagtgagcatctccgacattgcatccatttgtcgaaacatcacaattggtattccgtcaattcccagagccttgtttttcaccaatgctttcagtgcagcttggacttcttcctttcataccatcaggtctcgatcatatgctacctcctgaaatggttgaacatcgaccaattctttttggtacagtgactctgtgtattccttctacctgctttggatgcttcctgcattgtttaatttcattttgcccataaaaaaaaaaaaaaatttagaatccttcaaaattgcaactcaagtcttgaattttttcttcagctctttcagcttgagaaacgcacagcatgttcttcccttttggttttctaactccagctctttgcacatttcattatgatacttttctttgtcttctagacaaagcttttttactttatcacttcttctgttcgctttagttactcgatgttcaagggcaagtttcagagtctcttctgacacccattttgatcttttctttctttcctgtctttttaatgaccttttgctttcttcacatgtgatgtccttgatgtcatcccacaactcgtctggtcttttgccattagtattcaatgtgtcaaatctattcttgagatggtctacaaattctggtgggatatacttaaggttgtatgttggctcttgtggacttgttttaattttcttcagcttcagcaagaacttgcgtaagagcaattgatggtcttttctgcagtgggcccctagccttattctaacagataatactgagttttccatcgtctggctatgtgatatgtggcaattcgcttaacttctctgtgcctcagtttcctcacctatgaaatgtggatactaatggtacttctcagggttggtcaggtaaaatgaattcatacatataattacttatgagtgcctgacagagacaagtgtttggatttagtattattaaggatggacctatttaagatacacaaatgaaagtggtcaattttagaggtcttttaagactctagatctatagttctctgaaggaaaaatatacactcttgcttttaaagctctgcatatgagatagtgtgatgatcatactgagacggcctcccctttccttcctttcccttcccgcacttcatatactcagagatgtctaggtctaattttgtcttttcctctgtcacaactaacatttttgctacctgaagtatctgggtgtccaactatcttataatctgctataaccagctaggaagatggacttggaagagagagctgtagcccaatctaatatgtagtttgaagcaaacccaaaccaaactcattgccctcaaatagattctgactcatagcgaccctttaggacagagtagaactgccccacagggtttccaagaagcatttggtaaatttgaacggtgaaccttttagttagcagcctgagctcttaaccagtgtgccaccagggctccatgcaatttgaaaaagtttatattaaaatatcagaatgctctagagaagatcagggaaccaaaaatgacttgtctaaaattgatgcctgagaaggaaaaggctggactcagagtcttgcattgaactgaactttcaaggaagcttccagtaaggttcaccaatgtttaaaaactaaggctattccagctgatggcttaggccagtacagagtatgttaccgacctaggtggaagtcttcgcagggctgagatacaaaacatttgccaagaaagacaaggtacaaattgcccacacagcagcagatcggtgaattcccaagcttgaaaatcatttagggattccaaagagaggtgataaagtgagctcagcatcaaaatgaaaactggagtgagctatgaaactaattttgtgacccattcattatttaaattctttgaaacagatctcctctagcaatcaccattctacatagctttcgggctaattgccttgttgctgtattttcctgctccagtggttctttttactgtaatctctacgccatagtctacttgctttcggcatttcccaagccagctcaggaaggaactaaaaccagctccaaattttgtatttatatatttatagagtcttctctgtattaatcttgttctttcagtctctctgcattaaaaagctccactaggtatcattccttttcttacccccaagtacaatttaagcacacttcaaatggagggagctatgagatgcaggtccacactccttttaggatggagcaaaatggaacaaaaaagacccctggtagaaacagagacagattgcagtttcatagggaagtctagaaggtggagggaggcagaaagccagcgggtaacgtgcagttcttctgggcgaaagtcaggtaggtgtcaaatgaaagctgccttccctgctagaggtatcgaacacactggatgctattttgtgttctgaaagggcagctgttgtctcacacctaatctctgtccagtgggcccaccagaaagcaaaacgagaggggctgaggaaaaagaagtcaggtgcatgaatcaagacaggaaggaagggagggaggaagtaaaataaaaagtgctgcagtcattgggctgaattcacgagtctaggcagagttttagaataggaggagttggaggggagtacagcaaagactaccctcctctggaaaggcttccccccactcctttgtacttatcgaaacttcatccagcttctagtcattactgaggcccagcatcctctgccaccattgcaacccacataacagctctgctgtacttattgtttgtaccagtgcttcccaaatggggggcaattagactcccaggagacatttggcaatgtctagagacattctgaaaaccctggtggtatagtggttaagtgctacggctgctaaccaaagggtcagcagttcaaatctaccaagtgcttcttggaaactctatggggcagttctactctgtcctataggattgctatgagttggaatcgactcaatggcaatgggtttggtttggttttagagacgttttggttctcacaaccgggaggtgctactggcatctagtgggtgggggtcgtggatgctgctaattgtcacagctgtcaatagggctgtggttgacagagtttcacctgcttcactgatatctggcctctttcctcatggccttgactgttgttccattttctgggtttaagtcttgactgtctgtccagcttctagtccagacttgtgactttgttctattgacctatattctgggcacagtgccttgcacactgtaggtagagtgtgtgagtgaggagagatgagaaaagatgtgttttcgtgggcatctgggctaggggaagtcacctcctggcagcattactggcaaaccttgctaggcgcggaacagcacacaaagcatgaccttcgcctaaacaactggtgaggggtgagcactgggtggtggagacaggtgggcagggggtaactcagctcagaacaaagaggaggggctggacggcagcaacaaacccaacagtgggtgaagaaatgatagggaaatgggcatcttgatgcttaaataatgcttttaaacataatttagagaaaagcctaaatgccatagaagccaggtaaaaattgatctgtctgcctcccaatgctaccaggtctctgcgagttttgcacagaaccgactgcatttacatccaggcttttttaagagttttgctgaaaagaaataccagggttagtgcttgttctctgtatttctctccctcattttctcattctattcccccctcctcttctatgtcttccttgcccttttaatctaccagaaagagcacagatcactgacccaggccaatgctgctggcgtcccctcctctgtgaagctgtccagaggcccagtccactgctgcctcttcctgtgcgggtctcatatcttactgcttcctattgacatttccacggctattgccccactcagctgagggccagctccttggtgccatggaccatgcgctctctgactttagctggtcagcacctcgagaagtgctagggttgtactataggctcaatcatacacagccaccacctgcctgccagtggaagcttttgagttgctatgatgctgaacatatttcagcagtttccagattaagatggactaggaagaaagacctggtgatttattttgaaaatcagccaatgaaaaccctatggatcacaatagtccaattcacaactgattatgggaatggtgaaggacgaggcagcattttgttccattgtgtgtggggtcatcataagccaggagcagacttaaaggcagctaacagcaacagacatatcatcttgggcaaatctgctgcaaaagaccactctaaagtgttaaaaaggaaagatgtcaccttgagaactaaggcgtgcctgacccaagccatgctattctacagcaccttatatgcatgtgaaaacaggacaatgaataaggaagaccgaagaagaattgatgccttttaattatggtattggtgaagaacattgaatatagcatgaaccgccagaagaaggaacgcatctgtcttggaagaagtacagccagaatgctccttagaagcaaggatagtgagactttgtctcacatactttggacaggttatcagacaggttatcagtccctggagaagaatatcatgcttggcacagtaaagggtcagtgaaaaacaagaagttgctcagtgaggtgtattgacacagtggctgcaacaatcgactcaagcataacgattgtgaggatggtgcaggactgggcagtgttaagttctgttgtacatagggtcgctgtgagttggaaccaactcaatggtacctaagaacaacaactacaaccaactgttgaaaggaaaggcttgcgcttctcagaggctaagacaaaactctgttaaaggggctgatccccagaaagcgcaaggcagaagcggggcagccttataacaggccaactgagctgctcagatatagtctgcaggcctgaaggcatcctacctgggaacaggaggcagtgacaaactccttgtcccagaacatccctgcctgtcagctgcaggtggctttctgagaactcacttctattaaagataaaagccatttgaagatgcctctaggtgttaattttctaatcggtgtgcactgtgtattcccaaacacacattcgctaagatgtagcttccctttttctacctctcctgcctgatggcaaaaacaaaaacagaagcagaaaccaaacaataataaacaaaaacctttaactcatcactccagggtttccccaggccaatctccctagagaaaccctggtggcgtagtggttaagtgctacggctgctaaccaagaggtttgaatccaccaggcactccttggaaactctattgggtagctctactctgtcctatagggtcgctatgagttggaattgactcaacagcagtgggtttttatctccccagtgatttgggtttataggacagtcacattcagcactaaaatgctctcttgttctcttcttgcccttcctggccggactcagtgggaatgttaccagctcccatggagcgatggggaagaggagaccaccccacccgggatcctgctctctctgagttctctgctggcctttgctctggacatctctctcctcatctggaccttagcaaaagtaaataaactgtgcttcctcggtgatgacccctggctggtcttcatctcttgtaacttaccatgtagagttctctggcctcagcaatctactgagctgcgctttcaacccctccttgtcaggaaccttcctgttgcattcagatgttcctttgtggaatcagccccccttcctcgggctccctttcttctcagctaacttctggactcatttccaggaactccctgagcgctctgagctgtctgcagccctctcaggcatggatcactatgctgccatttctactgagctgcttagcatggagtgcaatcccctggctgctctgcctgtgctaggctctgcctgccccagaagcatcttactctcctctctgatgcccaaactgaaagcagacttctaccggttcctgcccccagctctccctaaggctagtgcttccattttaaacctgctcaaccctgatagcatagtggttaagagctcggctgtaattaaagcatcagcagttcaaatccaccagctgctccctggaaatcctatggggcagttctactctgtcctgtagggttgaattgacttgaacgcaatgtttctttcttttgccttcctacctcagagctctttgctggggagagcagggaagggaaagaggactgaaggagccagtctatttcatcccctgggggatcttttctgtttgttactgacaggtaccttttgagtctttaagtcaagatactggcaagcttattatcatcgataggttcctgaaagccttacacctctgcccagggaattttgcagcttctaatttcatgtaaaattatcaatccatgcacaataaaaacagcacatgtaggattttttgacgtgccaatttatggtaagtgcataaataccgttttaagaaatagctgatgaccctgaatcacagattaagatgactcaacttataaagagaatcatgccaaaatcaacatcagcaaattttttaaattagattacttttggatttgttttggaacttttcattttgaaaagctttaaaccttcaaagtctcaagaataatacaattaactcccatataacctttacccaggtttaggaactgtagcctttttccgacgtttgttttgttctctctctctctacctccctccatctctcctcctttccaagtaaaatcattcattcttttacaaaaccaaagcaaaatgattaaatgcaggaaatttaaaattgacactattaataataaaagcgaagtctgcaagatgtcaactttatttattgtactttagatgaaggttcacagagcaaacaagcttctcattaaacaattaatacacattgttttgcaacattggttgccaaccccacgacatgtcaacattctccctttcttgactttaggtttcccattaccagctttcctgtcccctcctgccttctcgtccttgcccctgggctgatgtgcccctttagtctcgttttgttttatgggcctgtctaatctttggctgaagggtgaacatcagcagtgacttcattactgagctgaaagggtgtccaggggtcatactcttggggtttctccagtctctgtcagaccagtaatttttttttttttttttttttgtgagttagaattttgtcctacatttttctctagctgtgtctgtgaccctctactgtgacccctgttagagcagtcagtcgtgttagccaggcaccgtctagttgtattggacttggtctggtgcaggccgtggtagttgtggtctattagttctttggactaatctctccattgtatcttcagttttcttcattctcccttgctcctgaaggggtgagaccagtggagtatcctagatggccgctcacagactctactcaccaaagtagaatgtagaacatctttataaactatgttttgccagttgagctagatgttccccgagaccatggtccccacagcctaacaattgggtccctcagggagcttggatgtgtctatggagcttccatgaccttgccttgtacaagctatgctggcttccgcagtattgtgtaccgtctgacccttcaccagagttagatttgtcaactttacaggtaccattttccctttgtaattcactagtaacttgtgcttaggtatttgaggctgtgtatatcctcttcttagttaaaattcacccaatggctttagcatctaaataaaaaagtctgtttttgtttttttttaatagtacttcatcatctaaaatgttcccgttctcaagattgatttttgtggggcctctgaatagatctctcaggtgtcacacccctcgttagttttgttcttcagatgaggaaggagagtatgaggcgaaatgaaggtctcatgtgctcagtttcagtgacattagtgaaatgacctagagaagtccccccgcatcttagggctgtataagaacagtggaactgttaacatcaagatcacagggcttttgccaaactgtaaagaactttttaaaactaaaactggagagagtttttttcttttaagcctacacaccttctggtatcgcttgaaaaatacttccttaatctctgggagggaaggtgaggctagggtcatccctctctctctttcccatcaagcaagagaataatgacccctgccctccttatcccaccagggtgttaaaaaggataaagtgagattcaggtgtgagaggccggtctgaatcagattattagctgcctctctgcgtgctacctgcagggatttgccagggttccctgttttccttcctctgatctttgcttgcttttccactttatggacacaagcagagcaggagttgggcttcttccctcctgtgattgctagctcctctgatcccaaggcctgccacctggcccaggctgctgccttgttgctcctttgactccatggttgttgcaacacttctctcttcagcagactttgcagatcttcactcattatgattcttcagaggtctgtgcagtttaacttgttgtattgcctgtaggagtcctgtgtggtgcaaacggttaacgtgctcagctgctaacggaaagcttggaggttcaagtctacacggggtacctcggaagaaaggcctggagatctacattcaaaaaatcagccattgaaaaccctgtggagcatagttctactctgacacacgtgggatcaccacgaatcagaatttacttgatggcagttggtttggtttttggttttggttgccctgtaagaccgtaaaaggccagaatagatgctatatgatgattaaaaaacaaaaacttcatatgagggcatgaaacatttgcttgcgcctgagtaactcatttgggaaagggaataattcattaaaagaccattgtccttatacaaaaaggcaagatgtaaaagcatcagacaacataacttcctctctcatctttccctgccgtgaaatagctccaaaatatgagaaatgggttcttaaaaagaaggtacacaaggtaaaaatgctttggaagctgaatcttttggatttatttacaaataattattaaacacggattctgaagagccaacattatgcgaggcattgtgtaggatataaagatgctaaaaataaaatgaaaaaaattttaagtgaaaccaggtttttaaaaaaatgatcattttaggacacttcacctatgtctgacttaattctcataaaaatcctgtgacatagcgattattgctatcaccattttataaatgagaaaatggaggctcactataggaaaccttgaattataatcccagatcctctgacttcaaactaaatcctcctcactacacaatcctcagaccttcagtttgcagcaaacaagtgctgctgagaggagtaaacacaaagtactacttggcttttccagaaagatcgaagaagttaataatattgaatgccattccagttggtcctgttgttgttgttctccagcttcgagttggttccaactcatagagaccctataggacagagtagaactgccccataaggtttccaaagaggagctggtggattagaactgccaaccctttggttagcagccaagctcttaatagggttttgacggcacggggagggtgagggagggagaatccagaaagaggaggtgggtaaacagacacacagaagtaatgagaggctaagcattgctctaacagcaattggagcagcttgctataatatggaatccctgcagaaaaaattaaaaaccaagctacagtaaaaaaaaaaaaaaaagggatggggtatattattgaactaagggatttagacattcttcagtgtttattgtatgcgtgtttgtggtagggtggaagcggtagtggtgatggtttcaaaagaagaaggcatgattaaggttgtgcatctgggaaactagccttgccttggtgcaaggctgatctgcaaagaggagctgaggaccaaacaattgcagaagacaaactaagaagctctgccagtggtccaaagaagacttaatgtgtttgtaggaaagggagaaaaacacaaagatatgagaaacataatcactggaaaatctaaaagactttacaatatattgaaggttgaaggtgaaagaatggaagccttgtttcgaatctgagcaactggaagactgatgccataaatatataacatcttaaagaagggagactctcaggaggctggagagttctaggataagaaaaatgaaagcaatacaaatagctaatgtacttacatgcttactatgtgcctggcatctctaagctctttacatataacatcttttttaattctcacaacaacccttggagctaggtagtaaacctactcctcacttactatcttgtcatctgatattttacatttatgacaatagtaaaaaacctactaccaactattttgcacattaatgatgtatgtctggcagtaatgaatgccgaggtgagagtaacattggttgtgatggttaaggttatgtatcaacttgtacggttctcagtggtttggcagttatgtgatgatgtaatttggcagttatataatgatgtaatttggcagatatgcaatgatacaatttggcagttatataacgatgtagtcatcctccattttgtgatctgatttttgcataatgacctggtctttggaacctaaccacgtcgataagtgaggagtgggtgtacttgtattattaattctgttttaatgatggagatgctgaggcaaagaagagttaaacaacttgccacacagctattaagcgatggaatcaggaagtggaccaggcatcctggctttagaatctatgcccttggccaccatgaggtactcaactctctgcttcctttcctttcctttccttttatctcatgagagataaaaggtggtgcaggccacaccccagggaaactccctttaccttagatcaaggaggtgacctgagtgagggtgatgttacaatcccataaaattacaatcataaacggaggacaaccatacaatactgggaatcatgccctaaccaggttgatacacacattttgggggggacataattcaatccatgacattccaccctttggccccccaaaaatcacatggaaaacatattcaccctgtcatatcatagcaaaagtcttaacttcaagtccaaaatccaaaaaatcctcttcatctgtgaaatctagaatacaaattacttgcttctaagggtgcaaaggcagaacaggtacaagctagatatttctattacaaatggagaaactgaagggaaagaaggcataaaaggcaccaaacaagtcagcagaacacattatattagccctcaaagttttgaaaataatcctctgttctctgagaaaatttacacaataaccttgccctccagactccaggtaccggccacactctctagattctgagtggaggcccctccgtcctgggcttcagctccaccttataagcccattgggacagcaactctgctccctgactttaggcacacttttctcctagtccatctgagtggcaactctacccttagaaacagcagaggccatggctccaccctttgaaacccctgaggtcatggtcataccttttgagactgaggcagctcagcgtcttgtgtttgtctctttagcttctgcttcctggtttcgtggcctcttggcaacttgggcctcacccccacatctgccctgcaggggcaaatgttccaaagctctgtagctccactgataagggcctagaggtgccccactccaccaggaagcctcaggctcacaggcactctcagatgtctcactcagtgggtcggctccagcgccatcttacactggtctcctggttctgctgctgctggttctctgctgttgccgcttctctactgttgctggttctctgctgcactggtcctctgccgctgtcgtggctctatccattcacagtttcaaaactgcttccacattttaggtatctgttagactagcaccccactcttggtaccaaattctttcttagtcatctagtgctgctataacagaaataccacaagtggatggctttaacaaagagaaatttattttctcacaatctagtaggttataagcccaaatttgggcagtcagctccaggaaagtctttctctgtcagccttctcatcaatgttcccccagatgaggagcttattcacgcagggaccctgggtctaaaggacgcgctctgctcctggtgctgctttcatggtggtatgaggtcctcaactctctgcttcctttcctttccttttatctcatgagagataaaaggtggtgcaggccacaccccagggaaactccctttaccttagatcaaggaggtgacctgagtgagggtgatgttacaatcccacaaaattactatcacaaatggaggacaaccatacaatactgggaatcgtggcctaaccgagttgatagatgcattttttgggaggcataattcaacccatgacaggggaagatcatttaggaaggaacaaaccaaggaaggaccatcggtaaagttgagccataattctacatgatggtggaaagtttgccaggtgttaaggggaaggttcatggcttggagaatcaacttagaccgctcacatacaactctcaactccatctctacctgccatcgattcagtgccttcaagccaaccgagcagataatggcacataaatcaattgccaaagaccctagaatggttcaatatttaaaggaaaccttcaattgcatcttttactgtagaatttagagataaatgacaaggtccctcactcattctttcagtaaaatagtcttcttatgtaaacaataaacctaactttaatcagtttaataaatttatttttaaagtctcttttatttatttatttacttttgaagccctggtagcacaatggctaagagcacagctgctaatgaagaggtcggcagttcgaatccatcaaccactccttggaaacccaaaggggcagttctcctctgtcctgtagggtcactatgagtcagaattgactctatggcagctttttttttttttttttttaacggagggaaattcaaaatctcaagctagcgagtcttcccacatttctatctgtggccctcagctcttgctctaaagggtcgtgggtgtgtgtccagcttggctgagataggattccatgtacagtacttccaatgattctgtccacatgggacatttggcttacacagctttcaactgactgctaagaatactcattagactaaatcaaacactcctattaaacatattataaatagtctgacagagagcaacagatacagcatcagaaaaaaagcagagatgggctggggatatcagtgtgtcttaacccatacacttaaaatctatactcctattttattcctttgttaacttctgaaatgaaagcaagaattattttcccctttgtcagtatgtttgccaataagaagtttgatatttgttctggaattttaaaaaaggcagagtttgtaagcttctggaaactctctgttacaaatcaaatctttgaatcattgcagcatgaggaagcccatgcatttcactgacttaggaggaagagcaggcccagatttaactaatccattttgtatagagccatgtcaagtacgccaattgtttatcctgagcagtcaagaagaaagacttgtgaaatctacaacaaaagtagcacatgtaagtgcttaatttggttttcttcaagacttctccaaaggcttccagttgaattttgctgaggagcgccaagtttgggcagctttttcttaaggcaatttttttttttccttttaagaaagttttctgataaaagaggtacttgaatttctgtaactattttagcctttcagtctatatgcttcttaatctctctagtcatgtttctctttcagtaaaaccatgtagatagacaagatgccacgcgtgcacagatatacacattatataaaaccaaaccagtcattttacagtcgattccaactcacggagacctcctgtgttgcagtcctgggcttcacagggtttccaaggctgtgaccttttagaagcagatctccaggcctttcttccaaagtgcctctgagtgggtttgaaccattaacctttcagttagtagctatgtgctaaccacttgtaccaccaatgactccacacgctatctacacatgaatatatatatataaataaatatatatatatatttgttattgttagctgctgtggaatcacccgagctcatggtggccccatggatgacagaacaacatgctgccccatcctgtaccatccccagggttggttgtagatcatatcgcttaactgtgatttatagttttccttggctgatttatagaagctgatcaccaggcctttcttcctactcttagtctagatgctccactgaaacctagcatcagagcaacaagcctctactgacaaatgggtggtaggtgtgcattagatgcactgtcagggaatagaacccaggtagcccacacagcaggtgagaattctaccaaggaacaactactgcccccaaaaaacatataggctgttcttactggcttttttttttttcactgcagatctgatgcgctttgacacttccatgaactttgtatacgtctccataaggacatttatcatattgtacaaaatgatttctcccctattagactgagagtgcaagatcaaagatgaattctgatccactttacgtccctgtcgcctgtcccagagtagcttctctctaagtctttggtggattgatgaatgaataaatgaaagaatgttccctatactgctattaactctcaatttacatatattaaaaacagaatttctgcccctaggctcttgttctttttttccctcaactttaggctgaagatgtagtgctcttgtgcttggaagtaatctatgtattttatcttcagagtatttaaaggaattttataatatattggagtccctgagtgatgagaatgattacgaaacacacttggcttctaaccaaaaggttggagatttaagtctacccaggcacacctccaaaaaaaaaagggctggaagtctacttctaactgttcagcctagggagcacagctctactctgacacacatggggtagcctcaatgtcagattagaaaaaaaaaaaaagaacattgctgtcgagttgatcctgactcacaggacactacaggacagagtagaactgccccatagggtttccaaggagtacatggtggagtcaaactggggaccttttggttagcagctgtagctcttaaccactgcaccaccagggtttcctcaatggcagatagttagaatagtgggaaattcaaatatgtgaatgagattttacagaccacagggaatatatgttccccctaagatagaagtactaaactcagataccacctctgaaacttgaaaaagttggacttttgggtttcttccaaccttgagaaatctctgaacaaggaaatatagagctttggcataaggcacagcagtttcttttaatgatagaaatatccagctttcaaaacactctatctccaagatctataggccaacccaaagtggacttcatgtcaagggtggattataaattgtacccgcttcactttactatcttttctcttttctgtgccatactgatttgaaccataaagggagattaaagtatgcaattaacgtcatcatccctcatccaaacctcccagagttttagagcattttcttcaaaagaagttataaaaccttggagttataagggctcttagagttcacatagcacattttgcgacaattgtttgaatgccttgagaaatcactgtcaaatggctattgatccttgagcgtttcaaatcccagggagaccatgggtctcagcaaagaggtcctgttaaccagttgccatcaagtcaattccaactcgtggtgaccccatttgtgtcacagtagaactgtgttccatagtgttttcaatggctgatttttcagtagattgccaggtctttcttccgaggtgcctctgggtggactcgaaccttcaaccttttggttaatagctgagtgtatcaaccatttggaccatctagggactccaaggtcctgttccaagctatcaaagatgtacctcccagaaacactcattgatttttttttccccctaatttggcctcttggggcaatgcagactaagttgaattcctctaacaaagaaaaaaacaacctttaaagacctaaaaggaagcttactgtttgttccgaatctgcccatctattcttcaggctgctgttccaagttctgtcacctatccctcaggttataccatctcgagtcatttattctcctggccattcttagctgaacgcattcaatgtgtccatcaagttccccttaatatctggtaacctccactgaatacaattattttcagtataatttgatcactgaaagtagagaaagatgataacctccatcatatcatttatgtggtctgtgcttatattagagccctggtagtgcagtgttaagatcgcagacattcttgggaccccttcatactgagattactattaacttttcaaatatattttttcctattaagccatagctctctgatgctgttactatacatttgactttagaaccattgccacacttcatatttgtttctattcaataccttgtttcttttatttaacatctttccttggctgaaaactttttaaattccaccgtgtgttattctcaaatgggatatacatgcctcgtattactcaagtgttcaagtcactgaccaaaaaatttaacagccatgagagaagcttgtaacatgccaaccaacactttcttctgattggtatcaatctccctttgggggcaagaatccaaccacgacctaatccaccacatattatccagaccacatttcttcaccttgtgccgcaaagtaaaggaaaatcttgtgagaaattttcatcctctaaaagctaaaagaacgttttaccaaaaaccagactgggaggtttagtattatattgctcaactatgtcccatgtcaagaatgcttaccttctcccttgggtctgcctaaacccaattatacaataagtctgtcctctgcctcagtctattttaccctatattcatctcttccttctttacattgcttcaatctttaaagtgggtcctacacattttgacaccaaataacagactcattgtaatgttctgcagttgtttcttcagtattactctcatatatccaattagattataatcttagtaagggtaggaattaaactctatccttttgcatcccttatggcatcaaaacccaactaagtaaagactggtatataccacaccacatgtacacacgtaatacttcaatgagaggggctggacaaggaaccaattcagctagaactaagttggaatagtttattttggtgaacagatttagcttaatactgcagcccacctatagaacagcctatagtgtattaatagaaaaaattatgaaattccatattttaaggaattttcacaaaatattttaatctctccacatttggagaggatacactacccgagatctttcttctttcctgttctcagtcttgatggtttttcaatttatgaaacatgagtgctctatcatagaatcaaggtccctgggtggcacaaatggtttgtgcttaactagtaacctaaaggttggtggtttaaacctacccagagacactatggaagaaaggcctggtaatctacttctgtaaagattacagccaagaaaaccctattgagcagttcaactctgtaacacatggatttgccatgagctggaatctacctcgctgcaattgtttttttttttaatcatagactcaatctgcagtatgaatatactcttggaaggttgttcagtaccagggggccacctgagaaagcaggaaatcttgcaatctgtcagtcctaaccaggaatcctaaagtaagacccaaaagcaatcctttactttgatcttagggtcatggatctgactacttccttctcatcagcagcactcattaaacacaaagcaagttcactgggaaccagctctcatctcaagcttctccacatttcacattgccaggaaactgaaggccaaaatatcagtgaattaagacagaatcagaaggcttatgccccagttgcacgtaagtatctttccagtaatcaacttcatcaataaagccaagttgcttactgctgaaaacttgagtgttgatatcttgtttgatcttttccctggaatgctacacacagccatgtaacaattactcaaagtcacagttctctcttttccaccaagggtgaatggtgcactcagctgccaatcaaaacactggaggtttgtgtccacccagaggtgctttggaagaaaggtttggtgacctacttccaaaaaagaccatccactgaaaactctatgaggcacagttctaccctgcaagcacagttcaactcagttgccatgagtctgaattaactcaatggcaactggtttctttctttttagcatatccactatgctatggacacactacttctgtgtaattttcgagctaagccctttcttctcatatcatgcaaagagaatgccaatatcagaatctatcaaccaaatgacttgcatccctagtgctgattgatgccaggtaaccccacaagctaagcacccagctctgaaaatgaatttcacttgtccattattctgggctaaaacacgcgtatggcttgccaatggacatttaactccttatggcttgtactgtagaatagggaaattgtcactgacccacactaggaaactttgttcataattgtactagtttcctagggttgccataataaaaataccacaaactgggtggcttgtaagaaccaaaatttattgtccagcagttctggagcctactagtcaaaattcaggatgttgggtgtccatgttctctctggaggccctaaaagatcctttctgatctctctcggctcctggtagccccaggtgttccccagcacatagatgcatcttctcatggccatcttccctctctttcttcgtgtatgttctcctggtttatagaatagaacaccactgagatcgaatgaggacccaccccactccagtatgacctgtgttaacttgactgataacaccttcaaagaccttatttccaaacaaggtcatgttcaccagtaccaggggttaggacttcaacatattttgggggagacacaattcaatacataatgacaatcatgcatctaagagaagctattgtaagtggcactgaggtggcaagaagcaggcaggagcaagtaatacattccctgcctggacacattccccccaagtgggccctttataacaacgtcattaaaggtcacatgatttgagtctgtctttttcttttttttttttatggtgttgatttattaattttcactcttttgctgagtgtcctgtttaacaactaagatgtatgtggcaaggtagatagttccacagaacttgggaggatgctagccacaaatgcaaataagctaaggtggaaattgaccctaccttgttagatttaccagcatcaagttctcattaaagaaaacgtggaaggcaaccaaatttaaagcacatatgaatggagatgaaaggaaaggttggcctgtataagtctacaaaaaaataaataacggtgctgagattttgaaagtaatgcaaaaaagaaatactactaatttttgccttcgagttgctaccaggccatcagtttaatgttagtgttaatcctttaataactctctgcgtaatctaattatataacaaattcattattttttcggcaaaaaagaaataaaaaactaaaatataagatgctgacacgacagaaaagctatgagaagaagcagtgtgaaatcaatcggtcaatctgttcagaataagattgaaacattaggagttagaggagaaaaatgcagagaaagcaagcaaaatgtgacatacctgcacacgcacttattgtatgatccagccccaaaacccacctgcaaagccaaggaatttttgctttgtgttgccattccctgatgtcagatgctactacttctcaggttaccacagtttagtgtaatagtatactatgtcagagtataaaaacccagtgccctaacaatcatctcatgttagagtatactacagtatatcgtaaacgtagtacaatagtatactacatttggtagtataatacagttctttacatcactagatagtgagctccttgagggatcctatctcattcattctttcctcctcttcttagcattgctatgtaagcaaatccatagttgaataagtaaacatatatacaaagcaagaaaccaaaccagaaaccaaactcgttgccgttgagtcgatttcgacccatagcgaccctataggagagagtagaaccgctccatagcatttccaaggaacggctggtggatttgaactgccgaccttttggttagcagctgagctcttaaccactgtgccaccagggcacttagagaaagcaagagggatctaaaattcccaagttaatcatccagcaatcaatcaaaactaacttcagtattatagaaaaataatagaacttgaaacatttcatcaccatcatcagtcaaccccaaaggagcagcagtcagttacattaaacaacatgtgatgactggcccgtcatcaaatcgccacaatcagaaaatattattgtaattagaaaatcctaaaggtaagggctatcgtgaggaatttgtcatccatctatttcaagacatttctagaatcacaggaaaaggaactttggaatcctccaagcccttaaaccaaccagtagtttcagactgaactgcaagaatctcgacagacaaaaatttcacttactttaaaaactctaaagaaaatattctgctcaacactgatcaaattactcacttctaataaaaattcctaagacattagttatagatgcagacaaattcttgcgactaaagatgtccattgcactgctgttcatgatagcaaaaaactgaaaattcagttgaagattgacaaaatcagacttatttagtcaatggaatataaggtagccattaaaaacaatatctattcaaagttgataattccacttgaaaacacttataagcttgtgttcatgaacacaggaaaatcaaagattatatacccagtgtgatctctaataaatggatggcctaacagaaaggagggagagagaaaggaaataaggtcaaacgttggatgagttttccttctttgaatttttttggcaatattttaatgtgcaaatactaatttcataatcagaaaaatattacatgtaagtagtaaaaaaaataagttgaaaataatgaagtgatatagtcatataggagaaagagttaaggtttgaaaaaccacctttaatcactttcaaacctgtctcttccatgttagagttgggcatacatttctaatttactttaataatcacctggaaaacatgaatacttttctgtcaattaagtagcggtctgcaattgcagattggtaaaagggacagtaaacatcatttctaataatctgtccagaaactattaaggcaccttttatatgaaagctatgcttgatattctaaacagcgtttaaaaacagaatttggctttcggagtatgcacactgaatgaaatttaaatggaactggtaactttgaatgtgattgccatatataaagcatagctggcttacttcaaaataagtatttgatagagaattatacatcaacataccgagaatattcataaatattatgtttggtacctgaattatatcatcaagaacagactttagaaggtggaaaaaaatttggaaactttaacagccatctaagtatctttgagatgggtatcattagtactcacaccaaaccacataatgtttattaaacattcagtatgtcaatactggctaacaacattatagatcaaacaacgcacttataaacccaagtccttctctgctgtagaaagaaccagttcggtattttaaatttcagcttttttaggaactgaagtgctttttgatatgtctgagacttcaaaataatcatactttttatacccatgaagcccagttaaggataaacatgtctacgttgtgtagatggttcaagacttcaaggccatctggataaagaggctatgtcggcctacgtattttcacagatttttttctacctactttaaaaaaaaaataggtcaaaatattttacctacaatcataaacacaatttactcaaatacaaggtgttttatcaattgtggtaatcaaccaacaattgagataactggaacgttacctatcacatagacaaaacatgtgaacagtggttgcatacttttatcccaagggtctgaattgatcaaatgtgtgccattatatacacggcctcagtgtattattttcagcttggatgaaaacattttctgaatagagctgatcccttcagaatataggtacagtaaaggttccacttggaactgaaaggccaaactgttattttcaaaagggctcttcttaagaagttcaaacagaaaagtgtaaatatattttctcggagccttatgactgatgagaagatgacggtgcctccactgaattgcactgggtcaggagatgggctgtactcagagctgtcgaaagaagtgctacagccatgaaaataatcccaaacccatagtctatcagcaccccaaagataaaacagtagttatttgacattctttagatcaaattaacccaaccgtatgcctcagttttcaagaagtatttcatgatgatatgtgtcggtcttcattaaaatacttgaggaagcatggttttctatattttatagccacaaaattttcatccaacctggatttgtttttcaagcaataccaaaaagaataggatattatagagatagcacaaagaaaaagctcccacgatttttttttttttgtatatgatagaatgtctcacagtcttggcagttgagacacttttttaaaatataaagtctaaaacgatacgtatcactgcagttcattcccacttcaccccactctaaactcaaggtcaattgttcaatatacctttgtcaacattaaaattatgattttttcccactctaggttttatgaaagctctggagctttagtgattttcataggacagattttccagtgtcttcattattactccaaattcaccgtcttatactttcattacatcctttgctcaggagttgtacctaactgaacaatcagatctagaatcttctatatgatgatcattctctattttgtctaatacataattggttcctccttttttcattgatgaattttttttgtttgctccaattctgatcagaagttaagatacttttgttatggactgaattgtgtccccccaaaatgtgtgtcaaattggctaggctgtgattcccagtattgtgtgattgtccaccgttttgtcatctgatatgattttcctatgtgttataagtcttaccgccacgatgttaacgaggcaggattagaggcagttatattaatgatgctggactcaatctagaaaattaggttgtatcttcagtcaatctcatttgagatacaaaagggtgaagccagcagagagacaggaggacctcactactaccaagcaagaagagccaggaacatgtacatcctttgggcccagggtccctgtgctgagaagctcctatatcagggcaagattgatgacaaggacctttctccagagctgatcaagagagagaaccttccccaggagctggcatcctgaatttggacttgtagcatcctgaactgtcagagaataaatttgtttgttaaagccacccacttgggttatctcttgccgtagcagcactggataactaagacaaccctcatattcaaatggtcttcccataactctacagtcatcaccaaatttaaaagggacgctatgaaatgagggtataaatagccttcacttacaaatgtccctgcactttgagatagaaacttaatttctttttctacagaaaaatagaacttaataaccttcaatataaaagacttctttttcatgtttgaaatcctgacaatgaaatagcttccaagttaaaacttcaccagcatcaagtcttacataagccatagtgagatgttaatacatccaacataaaaatcagtcaaggcaaaaacaccccataacttattttctaaaactgcaggagctgagaagaagctgaaatccactaaatcaacaaataccaaaatgagcaaacacccaagctctgtatccattgaacgagggtgcaccatatcttgtttgaccctctgggtgattactggattaaagagaattaaatcattgcttagtgaccctaggtgatgatccacaacaaggaaaggtgaaggatgggacctgtggcagagactgggagttttcctgcacattttcattatcacttttattcttcatcaacaaaacctgaatatttgcggggggtagcaatgtactcaactaggactacttcccagccttctttccagatatgggtagcagccgagatgtaagcagaagtcattgtctttgtgaagggcttctaggaaagctctttaaaaatgcccgagttggaaagtgctcttttgtcctccttctccctctcttcttcctgcctacactccccatcagccgcactgtaacttgaagtgaccttgagaatggaactatatggtaaaaatgatgggacagaacataaaaggcgcagaggtctctggtgacatcctggagccacttacatcagctctagcttgccttgccccagacttcgtgttacaaaggcgaaagataaatcctatcttgtgtaaaccatagtattttaggtctctatttccaggtgtacacaatttctagttgatgtaacagccttattacttatttagtgactgcaaagaagcctgcggaccccaaattggttatatgctagtcttaaattgtttttccattaatgagaataagttggataaagcaaatgcaattttttttaaatcagctttttttttaacagaaatatgtattttccacatattttggcaaaaggaggataaaatttaccagcacatataagcatgaaatccaaaaattcaaccaattttgtacagaactacttccagttgccacacagatacttatagtaggctacactcttattgtaacgagacctttgtattttaactcctgcactatccaacctgttcctttcactgactatgccagagtcacaagcttcagctgtaacatgctacgttggtcgcaaagaggcctcaggtaatagtaggtgcttagtcaggacaaaatgatacatcgtattctatacaaaaaggggccttgacttctctagagagtatgtgatgaggacagagattccagctgacaagcctgcctggaaccagtggaaattgaattaaatactttctgaaggcctcatccaggctaagatttcaatgatctgtattagccctcattaatcatataatcatctttccattctgtaactaagtttttatcaatttaagataatggcttctacggtctgtggaaccaaagctaaaatataacctcatagagccattctgtcccttggctagagagcaaacactgccactgagaatcctttgccatttgatgggaaggaaaagttgcccacagaaacactgacactacttttaaggcagaattgcagcatagcttgaaatctttcatatttcaaaatagaacacttttgaaagaggctacagctggctcaaggacaagtgtgaaacatttaggatagggagataaattttaaaataattattttttagataccctgaaggaaaaaaaaatcttataaaaactatttcatccggaacaatcaataatacagataaaaaataacagtcctgtgctgccaagtggggagaggtgtaagacaactcaataaatccacttaatagcattcatttgtacaatttgaaaaaggaaagaccacaaatctgttcttaaaatgtcaggttcccaatcccccctcttttttttttttttaaattaagatagtgagtaaaatccaaataatttttccataataactggttatgcaaagaaaatgatgcaccttgaaatgtctcatgactctgctaggacaacagttaaacatgattttctcccttttccctttgtgtgaaggtgtgtgagtgtgtgtgtcctttttccaccacttcctgaggctaagtctctaggtcaggtctctttctttgcagccagtaaatctgttccctgtccttgcagccagtaaatctgttacgagcttggctggcatgtgcaactgtgcctggtggctacattaaatattctgagtttcaagagcaccacagagtttttgctcagtttaagctaaacagacagagttaaagggaaactttattgcatttggaatgggtccacccactgccgctggactaggtactgacaagctactaggtagattcatatttattgtattagtgaaaatctactagtctccagggtggaggagagagagatgaattaatcatgcaggaagatgaaactctttcaaaaatgaaagcaatgtcccttccttccatgaaggctcctcccctccccataattttaacaggtcatatcataagcatcaaaggcaattatatatataaaacaaaagctaacagcattatgtattaggtagccagacctttcagatgcacagagtcagtgaaaacttgaagtgccactgccatccaactgaaatcggtgatgtatggaacggaacgtgagccattccctatcctcacatcacatacataccttctaaatctacaaagtgacactgagctctttagatcttgagtgtcacctttaataaacccatgacaaaaaactaaaaccaaacccgttgccgttgagtctgttccaactcacaacgaccctataggacagagtagaactgccccatagggtttccaaggagtggctggtggatttggatggccaaccttttggttagcagtgaaacgcttaaccactgtgccaccagggctccaaacctactgtagggggataacacaaccacaacaaggggaattcaaacttttgttattgtatttaccccctcagaaaacttatagacaaatctctcctggacacaacagagctgcagtgtagggactgggaactgaggaggaggttgataaagaaatctcaggatttgagatcacaggcaccgattatctaaacagttcaccaatgttgttaaaatgaggtgtggaagttcttacttggcctgtagagaaattcacctgcacatagacagatattaaattagaacatgcttaaaatggcttcctacaactgccaccaaccctcctcaagaaagccacatacgaagagattttagccacttccagctttgtgaaatctaaatatatacatgttccatctttgacctgtcatgggctgccgcttgctttacttgagccttcggcagctgtgtcttttcctctgtgatgctgagcttcctgggagagaagtgaacgtgaagccatggtcagcagcagctgcagcactcagtatctggctgaagaagccttctcttagccttttccctcacaaagtcagactccaggttcactttgtacatttctccccagctaagatgtgagactgagcaacgtccaaactttcatgaactaacaatttgtctctttggctaatgtgagtgtgacatttccacagtactcctctgccaaccaaactgaggaaaatgctcaatgagatgtgttgacataatagccacaataatggactcaaacataccaaccatcatgaagatggtgcaggaccaggcagtttttcttctgttacacgtaaggtcaccgtgagttggaaccaattcaaaggaaactaacagtaaccacaacatgcttctctgggacctatcacagggagagctggggagccattttgtccatgcatccctttcactaagagtcttaaatttagacttctggttttcttcatgtgaaattacacctacagatagatacactataaggattgaaagtctaccacatgagtcatacagctttagttgtttaattagaatgtttaaaatgctcacagtcttcctaactgctttgccatttctacattactactacggtcctcaaaaactggaagggtccaaattctcctgactttctaaaggtctatggagataaaccagtcactaaagacagtgttctgagcaaatcatgaaaaaaagtttttaactcatcatcacacaatttatgggtcaggagccctggtggcacagtagttaaacactcagctgtgagccaaaaggttggcagtttgaacccaccagctgctctgtgggagaaagatgaggcagtcttctcccacacagccttggaaaccctatgggagagttctactctgtcctatagggtcactacgagtcagaatcagcttcacagaaacaggtcaggtggggaaaacgggttaggctatattgcactccagcaccattggatggataactaaaagcacactgactacatttttaactgaccttctgaaactaacattgaaaataacttatacatacttgaccacccaatatggttccacgcctagttatacgctttgatatttagtaaaaattttaaatttctcacttactgagttgactcaactggagggctgaaatagatccagtaatgaattacagtgttaacagaggtctgcttacagctacttgattttaggatgaatggcagaataaatcttaagaggaaagcaaatacattttgattttatgtacactacgtcttttagcaataacttctaccactggttttgctgtaccttattattagcaagttccaaagggaatttagaaatgcctacctgccgtacgattaattacttttgtgtggcctttctagccatggtcttgtagctcccacccaggtgattgtgtgatagggtaattgtggcctactaagggggttggtcagttttaccttaaaagaggaccaattccagagcagagaggagcccaccaccatcaaggaagaagagaccagcaggaaagactgagcagcagagacctggcagcaggagatgactcggtgggcttcctggcccagggagagagaaagctgagtgttttggggcagagattgagggccagggagaggcatgcctgtgagcacagctgggtagagactgtctatcctaagtatttctgagcctgaactgtagctgttacttccattataataaaccccacaattgtgagtatggtctttgagttctgtgtcgccattgcaatgaattatcaaacccagcagagacgtacagagtgctgtgagagggatggttaatgtcagaattagtaaagatggctgagagaggaggcttgtctggcctctgccttacgggagtcagtcttgcgctattgatcttgattctccttctccatgtggggttggaggaggtctgacactgcccccacaccataatcacaccatcaatatatttcacattaaaacattagatgaaactaaaatttaatttacacttttttagaacagaataactgtagatcacttattagaataacactcaacatgagcagaggcgcatggtgcttataaaagcataaaagtaatgtaacttttaactagagtattcatgtttaaactataacataaaattttcttttcctgtaaccaacagaagaagtactcaaagacattaataatagcaaagacgtttaaaagaaagtaagaagagtagaagttcattaaaaagacagggaaaaaaaagacaagatcaagatgaatgccagaaaagcctctgaaacttgctcttgaatgtagagttagctaaagcaaatggaagaaatgaagtaaaagagctgaagagaagattacaaagtgcacctccagaagacaaagtcaagcattataatgaaatgtgcaaagacctggagttagaaaaacaaaagagaagaacacactaagtatttctcaagctgaaagaactaaaggaaaaattcaagcctcgagttgcaatactgaaggattcttgggcaaaaaagtgaatcaaaagaagacgggaggaatacactgagtcactgtaccaaaaagaattcattgacgttcaaccatttcaggaggtagcatatgatcaagaacctatggtagcaaaggaagaatttcaagtcacgcagaaggcaccagcaaaaaacaaggctccaggaataccaattgagatgcttcaacaaaaggatacaatgctggaagcaatcactctctataccaagaaatatggaaaacagtcccctggccaaccaactcgaaaagatccataaacttgcccattccgaagaaaggtgattcaatgtaatacagaaattatagaacaatatcattaatatcatatgtgagtaaaaatttactgaagatcattcaaaaatggttgcagcagtacatcaacagggaactgccagaaattcaaactggattcagaagaggacgtggaacaagggatatcatcactgatgtcagagggatcttggctgcaagcagagaataccagaaagatgtttgcctgtgttttactgacgatgcaaaggcatttaactgtgtggatcataacaaattaatggataacattgcaaagactgggaattctagaacacttaatgatgctgatgcagaacctgtgcatagaccaagaggcagtcatttgaacagagcagggggatgctgtctcttttaaaatcaggaaaggtgtacatcagggttgtatcctttcatcatacttattcaatctgtaaattgggcaaataatccaagaaggtgtactacatgaagaagaacactgcatcaggattggagaaaaactataacaaactgtgatatgcagatgacacaactttacttgctgaaagtgaagaggacttgaagcacttactgatagaagaccaaagactaccaccttcagtacagattacacttcaacgtaacgaaaacagaaatcctcaaaactagaccaataagcaacaccttgataaaccgaaaaaatattgaagcctccaaggattacattttacttggatccacaatcaatgcccatggaaacaacagtcaagaaatcaaatgatatgggggacagcgagtggccagaggcaggtgaatgtgttcaggtctttgcaatcttcatgctgtgtatattctagccaacactcattagcccacatgtctttgactgttttttaagccttacaactgtcatttagtctccatgaagaaacttgttagctgccatcaagtcagttctcagctcatggtgatcccacacacaatggaacgggacatggccaggtcatgtaccatccccatgattagttgtaggttggactgtttttatttatttatgtgttcattatgttttaggtgaaactttacacagcaaattaggttcccatttaacgatttttatacaaattgttccatgacattggttacaatttttacagtgtgtccgcattctcattatttacattgtttgttttgttaccatttatctagcttccatgcccctccttgcttctcatctctacttttgggttaatgttgatggtttaagggagcacattactcataggtgatattgttcagtttataagctaatctattatttggctgaaaggagacctctggtagtagcttcagttccaagttaaaaggttatcttagggcaatagtcctctagtctttaccagtccagtaagtctggtcttttttaggaatttcagttttgttctacatttttctcccactctgtctgggaccttctattttgtccctgctcagaactgtcagtactggtagctgggcaccatctagttcttctggtctcaggctaaaagaggcagtggttcatgtgggcgattagtcctgttgactagtttctcctttgagtctttggcttccttcattctcttttgctccagatgggaaacaaccaaaagttatatggtagaaggccactcacaagcttttaaaacccctgatgctactcaccaaactaggacgtagaacattatctttgtgaaatgttatgccaatgactgattcgtccctcaagacgatggccccaagccctttaacctagtaaaccaatcccacgaggtatttggatatgtctaggaggtctctgtaactgtacctcctatgtgctttatggagtgctggtggcacagtggttaagagcttgggtgctaactaaaaggttagcagttcaaatcaacgagccactccgtagaaaccctatggggcagttctactctgttccataaggtcactatgagtcagaatcgacttgatggcgatgggtttatttttgttgttgtttgtttttatatgctttattacatgtatgaatatgtacgcagcatactcaaacatgtacatacttatgcctacaaatacgcctatatatccacatgtatgtactcacatataccttcctatacagatatagcatacatctgtaaccactcacattttttgcttattattattgttattaaaaaattatatatgttataacatttacagtaattgtacttcactctgtgtacctctcagtgtctcatttaccttggtcaaattgtgctgacttccaccatattgtatactgcctttcccatcaccagaaataacaagtgtctactatcttttttttttttttactatctagcaagtgagttctccctttgtcccccttgcatccctggtaaccatcaaagaacattgattggctttctgtgtgtatacatatttcgctcaacataatgtcctccagattaatccacgttatgattctcggactcatcgttgttatttaaagttgcatagtattccactttatttatgtactgcaatttgtctacccatttatctgttggagggcacttatgttgtctccatctttttgctactgtgaatgatgccacaatgaacatgggtgtgcctatgtctattcttgtcactgctcttgtatctctaggatatatacctaggagtgggattgcctgtttaatctcttttatatctcgaaagagattgacttaagatataccctacactaattttgtctcatcagtataccagagataacccattcccaaatgggattattaccatgggcatggaggttaggatttacatgtttttggaggacacaattcaatccataatatttacactttggcccccaaaaattcatgtccttgctacatgtgaaaacacattcaccccaaaacatcatctcaaaagtcttaaaccaaatccaagtccaaaatctcatcttctgaatcatctaaatcaactgtgggtgagacattagtcatattccatcctggggcaaaacataagggtggaacaggcacaagtagacagttccattacaaatgggagaaactggagggaaagaaggaataacaggaaccaagcaagtccaaaacccagcagaacaaattatattaactctcgaggcttaaaaataatcctctcctctctgagaccatttgggaaatggctttgccttccagaatctgagtgtggccataccctctgaatctgggtggaggacgcttggcctggaattttagccttgccttccaggcccattgggatggcaactctgctccctcggctttagcaggccccaatctcctagtccatttgagtggtgagcctaccctccttggccctggaaggccccattctcctgccccttgggcattgctaccccatcccctcagctttgggcaattgattcattctccctggcacactttaacggcagccccatactccagaaccaagctggcaaagatccaactcttcgaaacctaggaggttatggttccaccctttgagttccaggagaccatgaccccaccctttgaaaccaagaaggccctgcttcccatgctccttccagctgctctgctgacctctgagctgctccagggatggttcttttctttttttggaggacaacagatgtagctcctatggcctgtttccagcctgtagaattccaagaggcaagcagcattctttcctttggttccttctcttttcccttcaaccaaagctgacagttttcctgctgtggtagccagttagatccatcagtacaggcttaatctcttttaaaaaaatgattgtgtagccatggccttggtgaacattctaggacatgtgtccttagtttgtacaacagaaacttccaaatcagaaaccctggtggcatagtgcttaagtgttacagctgctaaccaaaaggctggcagtttgaatccaccaggggctccttggaaactctatggcgtagttctactctgtcctatagggtcgctacgagtcggaatcgactcgatggcagtgggtttggtttagttttgttttttttctttcctctcacattttattataagcagcaaggagaaaccacgcagcccctataagatcttgcttagaaatttcatcagccagatatccaagtttatcacttacaagttctaccttccaccaaacattttaacataattcagacaagttctttccactgcataaaaagcattgcccttcctccattgtccaatcacatgtacgtcattttcttctaaagcctcatcagaagcatatgaatgctgacatatctaccaatattctgttgttgatgctatatgtattctccaagataacagaggctttctctacagctctcctaacttccctctgagccctcaccaaaagtgcctttgatgtccataattctaccaacagtctcttcaaggcaatctaggcttttactattagacaccttaaaactctttcagcgtctacccatcacccaattccacatcctcttcaacattttaggtgcctgttaaagcagtgccctcctcttctggcaccaagttctgtctcagttatctagtcctgctataacagagataccacagtagatggctttaaaaaacagaaacttattttcccacagtttaggagggtagaagtccaaagtcagagaactggctctaggggaatgctttctttctctgttggctctggaataaggtccttttctgagcttctgctcctgggcaatcttcacgtggcatggcatttctcttctcccatctttccttcttttgcttgcttgtttaatctcttttatacctcaaaagagattgatttaagatataccctacactaatcctgtctcattaacacaacaaagacaaagacaactcattgccaaatgagatttaatcacaagcacataggttaggacttacaacacatacttgttgggggcagtggggcacaattcaatccataacaggttgtactgacattttcataatgtcaagtcgtccaatccatgagtatggaatgtttttccatttatgtaggtttcttttggtttcttgcagtagtgttttgtagttttccttgcataagtctttttatgtcccttgtgagatttattcctatgtattttctccttttggaaggtattgcaaatggtattgttttcctggtttccttttccatgttctccttgttagcgtagaggaacccgactgatttttgtgtcttgatcttatatcctgccactttgctgaacccttctattcattcgagtaactttcttgtggaatatctgggattttctgtgtataggatcatgtcatctgcgaacagggatagttttacttcttcctttccaatttgaattcttttccctttcttgccttactgctctggccaggacttccagtacaatattgaatgaatggtgataaagacatctttgtctcattccagttctcaaccggaatgcttttaacctccctcctctgaggataatgttggctgttggttttgcatatatgcccttaattatgttgaggaatttccctcctattcctattttggtgagagtttttatcaggaaacggtgttgaattttatcagatgtgttttctgcatctgttgagatgatcatgtgattcttttccctcatgttatttatgtggtcaattatgttgattgattttctaatgttgaagcacccttgcatccctggtatgaatcctactttatcatgaaatatttatatttatttgatatgctgttgaatttgttcagaatttttacatctatattcatgagatatattggtctgtaatcttctttctttctttcttttgtggtatctttccctggctttggtatcacaattatgatgccttcaaagaatgaattagggagtattccttccttttctatgttctggaataggtggagtagaactggtatcaacttttctctgaatgcttggtagaattctctagtgaagccacctgggcctgggctttttggaggagactggggggagtttttttttttttttttaaatgaactctgcaatttctttttttgttatggctttttttagattttctacctctatttgtcttaatttaggtaggtagtgtgtttttagaaatttgtccattttttctaggttttcaaatttgttggagtgtgatttttcataatattctgttatgatcctctttatctcagttggttctgttgtaatgtcacccatttcatttcttgttttggttatttgtgtcttcccattttttcccttgtcaacatggccagtggtttgtcaattttattgatttctcaaagaactaacttctagtcttattgattctttctattgtttttttctgttttctatctcatttgtttctgccctggtctttattatttgctttcttctggtaactgttgtcttcttttgctgttccttttctatttgttcaagttgtcaagttaagttgttgaatttggacctttcttcttttttaatgtgtgcatttattgctataaatattcttctgagcactgctgttgctgtgacccaaaggttttggtatatcttattttcattctcatttaattctaagacttttaaaatttttctattacccagtagtttttaagtaaggtgctattcagtttccacatatttaattttttccccttgctctttctgttattaatgtctagtttatagcattaggttcagagaatatgctttgtattatttcagcgtttttgaatttattgaggcttgctttgtggcctaagtatggtctatcctcaaaaatgatccatgtgtgctggagaaaaatgtatactgtgctgcttgttaggtggtaagttctagatatgtgtatgacgtcaagttggttgattgtgttatttagatgttctgtatctttgttgagtttctttttagctgttctgtccattgcaagtggtatgttaaagtttcctactactattgtagaactttctctttccaattctgctggttttatgtattttggagctctgtcactgggtgcataagtatttatttttgttatgtcttcctggtgagttggccttttaatcattatatgatgtcctttgcctcttataatggattttgacttaaagtctgttttatcaaaaattatttttgctactcctgctgtcttttggtttgtttgcgtgatgtatttttttccatcctttggtttttaacctatttatgtctttgtgtctaaggtgtgtctcctgtaggcatcatatttatgggccatttttgttatcaattccactactctctgtctctttactggtgcatttaagtaatttacattcaatgtgattattgatatgtatgaattcactgctgccattttgttatactttgtgtgtgtgtgtgtgtgtgtggtattaatactttcttcatttctcttaattttctgtggtgagttctttttgtatatggattttcttttcctatcattcattgttgttctttttgtctttactgagtctttttttattttcttcttctttattttggtgagtagatttattaactttctttgtggttaccctgaaatttacctttatccccctaagtttaaaacaatctgttatctcttgaaattgccttgatttccatatggaagtctataactacaccatttattccgccccctccccttttgttttgaagttatcggtcatttacagcttaacatctctgggtcactgtaatcagatttgcagttttgtattacttttgtgaaatttttatctggattgttatctgggtgacaccagttgcatgtctttatctctggttgttgtctgatgtccttggttctctgtccaaaggagtccctttaatattgcttttacagttggtcttgtttttacaaattcccttaatttgtttacctgggaatgccctagtcttgccatcatttttgaatgacagttttgctggatatacaatttttggttggcaattcttttcttgcaagattttgtatatgtcgctctgagtttgtctacacagtatcactgtctcatatggggaattccataaagttgccttcctgtgcccctcacccaggaacactggtcaatttgtctcaagacagccatcctgcactgagccagctggcagagtgtctacgatccataaatttccttgttcactgttttcattcagtttctccttccatttggtgtttgatctaatttttcatccttccatttgctgctcagggttccaaggttgtcatctgtatctgtttcacttggtttctcaggtctttgctgtagggagattgcatggtgtgtctgactaagtcaccatcttctgctgtctcataggttggactgttttgatacatagggttttcacaggctgattttcaggagcagattgccaggcctttctacctagtccatcttagtctggaaactctgctgaaacctgttctgcatcacagcaatgtgtaagcctccaatggcagacatgaggtgcactggctgagaattgaaccgaggtctcccatacgggagctattaattctattacacaaccactactgccctcattagacgaaatttactcatgattatttactccaacccagtctcttgttctccattgacaagccctcttgcctacaagttgttgccttacatcagtacgtctcaactttggtaaatcctcatcaagtgtgttgcactggtatgctgtatcagctataagctgtatcgataagaacttatgaataaagatattgacaaagattaagcaataagaaaaagtaagtaataacagccatagttgcttttgttctccactatgctgtcctgaacggggaagaaagaggtggagtttggctgcaaaatggggaaagaccacaaacctgagaacatccaaaggtccatggtgctcctgtgaccatcatacactcatgaagcaaagtatgaaaagatagatggcttgtttaaatttctgttgctaaaaccagatgctgaatctttaagagtgggaataaagttttattcactttgaaatgcatagctactagcaaagtgcctggtactagaatgtttattaaatgagaaaggaacagaatggtgcttgaactttaaaattatttgtagaccttggatcctgggctgctttctcctttttgctgggtcctatctaaatctggctgtttccccatccttggcagcctggtcctgttgtccccaactacacctccctttgttgcttagacttatccccagactcttggagttgtgacacattttcctaaaatatccttatgcaaaatggaagcccaaggaacataaagaaaataagcttgacatagattctatacaatcattttttttatgtatatgtatggaaaccctggtgttgtagtggttaaatgctatagcttctaaccaaagggttggcagttcaaatctgccaggtactccttggaaactctatggggcagttctactctgtcctatagggtcgctatgagtcggaattgactcgatggcactgggtttgttttttctttggtttacatatatatatatatatatatatatacactttacatctataaatcctatagcatatgttctaaaagcagataactatgtatttctctattaatcaaaagtattatttatacattaaacataagtgactgaagaccagataagttgtgggatgacatcaaggatgtcatacatgaagaaagcaaaagatcattaaaaagtcaggaaagaaagaacagaccaaaagagatgtcagaagagactctgaaacttgcccttgaatatagagaagctaaagtgaatggaataaataatgaagtaaaagagctgaacggaagatttcaaagggcagcttgagaagacaaagtactataatgaaatgcacaaagacatggagttagaaaaccaaaagagaagaacacacttggcatttctcaagctgaaagaactgaagaaaaaattcaagcctcgagttgcaatattgaaggattctatgggagaaatatcgaacgacgtagaaagcatcaaaagaagatggaaggaatatatagagtcactgtaccaaaaagagctgctcaatgttccaccatttcaggaggtaccatatcatatgatcaagaatcaatgatactgaaggaagaagtccaagctgccctgaaggcattggagaaaaacaagtttccagggattgatggaataccagttgagatgtttcaacaaagagatatagcattggatgtgctcgctcatttatgctaagaaatttggaagacagctacctggtcaactgactggaagagattcatttatgtgcccattccaaagaaaggtgatccaatagaatgcaaaaattatggaccaatatcattaatatcacacacaagtaaaattatgctgaagctaattacaaaactgttgcagcagtacactgacagaaaccaccccaaattcaagccagattcagaagatgacatggaacaacaggtatcactgctgatgtcagatggatcttggctgaaagcagagaatgccagaaagatgtttacctgtgttttattgaccatacaaaggcattcaactatgtagatcataacaaattatggataacattttgaaaaatgggaactccagaataattaattgtgctcttgaggaacctatacaagaccaaaagtcagtcattggaatagaacaacatggtttaaaatcagaaaaggtgtgtgtcaaggttatatcttttcaccatacttatgcaatctgtatgctgagcaaataacccaagaaactgtactatatgaagaatactacattaggattggaggaagactcattaacaacctgagataggcagacaacacaaccttgcttacggaaggttaagacaacctgaagcacttattgatgattgaagaccacagccttcagtatggattgcacctcaacacagagaaaacaaaaatcctcataactggaccaacaagcaacatcttgataaacggatttcattttacttagatccataatcaatgcccatggaagcagcagtcaagaaatcaagtgactcattgcactggacaaacctgctgcaaaagacctcttcaaagtgttaaaaagcaaagatgccactttaaagactaaggtgtgtctgagtcaagccatggcattttcaattgcttcatatgcatgcaaaacctggacaatcaataaggaagactgaagaagaattgatgcctttaaattatggcattggtgaagaatattgaagataccatgtactgccagaagaacaaacacatctgtattggaagtacagccagaatgctccttggaagcaaggacagtgaaactttgtcttacatactttggaaatgttattaggaggggccagtccctggagaaggacatcatgtttagcagtgtagagggtcagcaaaagagaggaagaccctcaatgagatggattgatgcagtgactgcaacaatgggctcaaacatatcacttattgtgaggatgatgcaggaccaggcagtgtttcattctgttgtacacatagtgtcactatgagtcagaacctactcaatggcacctaacaacaggtggttaatgcacactacatagatgtgggacctcaattagaaggaaatttgtgtatttattagtctatattagtgtacctagagtctaatatactacttagctataaaggtggaggtagtttacctgtcaaatgatgatatgctagacccctcccttattgtcatatcggaagtgatgacaaaagaaggaaacatttgacttagcatactctgagaaaagaggaaactaatacgtacacagttattgaagccaggaagcttagaggatgtggctatggtggaggaaagcgaacaaggtggagacaacacacgttatctttgttatacatgctttatgctatgtagtttaaacgtagtttgtaactcagtagaaaacagaacctagagaacagactcaaaagcagagggttatgttgtatagctatataatctggtgtgtcatgtagaggccttcgtagtagaaattgtgtccagctagatagccattctctccccaaatccatgtttctcacacagatgtagttatttcaagtaaagtacagagcagagactggaacaaagaacttccaaatgtaaacattatttatctttggaagatggaaatatggatagttttttttttcattcacccatattttcttctgttttgtgagttttctaagttgaatggatttttttctctagaagttctgtttgattcttttagaaatcaattaggcttttttttcttatagtgtactatatttttatgcaagtgacacacacctgtgtttgtttactggcctcacccccccctcccaaggcacccttacatacaccaccatgccagctgtaaaaaaaattagcatagcactcttaagaaaataccttgaggggggagggtgcagccagcaaacaaatacagaaagtgtgtgtcacttgcataaaaacaccatattgttttttggttatatattcagcttctctattattcttttaaacaggtatgtagtagttaaagtaaagctgttgtttttgttgttgttgttaggtgcaattgagttgattccttctgttgtaattagagcttcaacaatacagagtcaaagaactaagaagtttatatctctcacctgtctcaatgtgaatggtgaggtcagtgggggaagcacttctttctgtgcccattcagggaacaaggtcccatccaagccattgctccaccatcccctgaggcactgtcaacatgtgcatggttaaagctgattgctgcccctctgtgactccagccaaatgtgaaggagcaaaaaggggaagtgacacatatttccacacacattgtatttgtgagaacttaaacacatggccacacctaactgcagagggaaccgggaaatgtagttaaaagctaggcagccatgtactctataattctattactaaggaataggagaaaatctttttttatataattagtcatctcaaccacgatattaagcgtaaggattttatattacatgcctaatagttccaatatcaaagtctttgcagtcaactactcctcctttttactcttaaggccaagtttcctttggtgttttttaatttttgactgtcaattcatgttctatgggatgttatttgtgggaatgttttgaagtctaggttgaagttgcagtctttcagaaatgaagagcagttatttttgcctaccaactctaggctatttttaagtaaaatatttgcttaagtttctttggcccacatggacaaatttccttgttgatcatttctgggctatgcacctatttccagctctcactgttctaggggtgcagcccttttgggtctcaccttgagtgggccccagtcattatataccatgaagccatcagagcagaaggttcagggactggcaaatactctcaagtgttctggtgcacacttatctcctaagttcctgtttttacttaaattttggcctctatagattccttgttttgtgccagctttgtaatgcatttaaaattattttttgtttatttgcttcatattttaatcagcattttagttttcttattgggaaggttgtttaggttttctggtctaagataccatcagagatggaagttctaatttaattttacatgaaaaatatacctacaatgaaaatgatttgagaaattattaaaagaacatgagagctggaatcacaagcctagagtttcacacctaaatttttttttttttttaatttttattaagcttcaagtgaacatttaccattccaatcagtctgtcacatgtaggtttacatacatcttactcccttctcccacttgctctccccctattgagtcagcccttatagtctctcgtttcgtgccaattttaccttcttccctctctctctatcttcccatcccccctccagtcaagagttgccaacacactctcctgtgtccacctgatttaattagctcactcttcatcagtacctctctcccccccactgaccagtccttttcatgcctgatgatttgtcttcagggatggttcctgtcctgtgccatcagaagttctggggagcattgtctctgggattcctctagtcgcaatcataccattaggtgtggtcttttaatgagaatttggggtctgcatcccattggtctcctgctccctcaggagttgtctgttgtgttccctgacagggcagacatcgattgtggccgggcaccaactagttcttctggtctcaggatattgtaggtctctggttcaagtggccctttctgtctcttgggttcttagttgtcgtgtgaccttggtgttcttcctttgcctttgctcccggtgggttgagaccaatgaatgtattttagatggctgcttgttggcatttaggaccccaggtgccacaattcaaagtgggatgcagagtgttttcataatagaattgttttgcccattgatttagaagtcctctcaaaccaagttccccagaccccagcccctgcttcgctatcctttgaagctttcattttatctcggaaacctctttacttttaatcctgtccaattaggctgaccttccatgttttgagtgttgtctttcccttcacccaaagcagttcccatctacagattgatcaataaaaagccctctccctccctccctccctccctcccccctttgtaaccacaaaagtatgtgttcttttccgttttttctatttctcaagatcttataatagtggtcttatacaatatttgtccttttgcaactgactcatttcgctcagcataatgccttccagattcctccatgttatgaagtgtttcagagattcgtcactgttctttatcgatgcgtagtattccattgtgtgaatataccacaatttatttacccattcgtccattgatggacatcttgtttgcttccagctttttgctattgtaaacagagctgcaataaacatgggtgtgcatatatctgtttgtgtgaagggtcttgtatttttagggtatattccgaggagtgggatttctgggttgtatggtagttctatttctaactgtttaagataacgccagatggatttccaaagtggttgtaccattttacaaccccaccagcagtgtatgagagttccagtctctccgcagcctctccaacatttattattttgtgttttttgaattaatgccagtctagttggtgtcagatggaatctcatcgtagttttaatttgcatttctctaatgactaatgatcgagagcattttctcatgtatctgttggctgcctgaatatcttccttagtgaaatgtgtgttcatatcctttgcccacttcttgattgggttgtttgtctttttgtggttgagttttgacagaatcatgtagattttagagatcaggcgctggtctgagatgtcatagctgaatattctttcccagtctgtaggtggtctttttactcttttggtgaagtctttagatgtgcataggtgtttgatttttaggagctcccagttatctggtttctcttcatcatttttggcaatgttttgtatattctgtttatgccctgtattagggctcctagggtagatcctattttttcttccatgatttttatcgttttagtctttatgtttgggtctttgatccacttggagttagtttttgtgcatggtgtgaggtatgggtcctgtttcattcttttgcaaatggatatccaggtatgccagcaccatttgttaaaaagactattatttccccaattgactgacactggtcctttgtcaaatatcagctgctcataaatggatggatttatatctggattctcaattctgttccattggtctatgtgcctgttgttgtaccagtaccaggctgttttgactactgtagctatataataggttctgaaatcaggtagagtgaggcctcccactttcttcttctttttcagtaatgttttgcttatccgggggttctttcctttccatatgaaattagtgatttgtttctctattcccttaaagtatgacattggtatttggattggaagtgcgttgtatgtataaatggcttttggtagaatagacatttttactatgttaagtcttcctatccatgagcagggtatgtttttccatttaagtgtgtccttttgaatttcttgtagcagagttttatagttttctttgtataggtcttttacatccttggtaagatttattcctaagtattttatcttcttgggggctactgtgaatgggattgatttggttatttcctcttcgctgttctttttgttgatgtagaggaatccaagtgatttttgtatgtttattttatatcctgagactcttccaaactcttctattagtttcagtagttttctggaggattccttagggttttccatgtatacgatcatgtcatctgcaaatagtgatagctttacttcctccttaccaatctggataccctttatttctttgtctagcctaattgctctggctaggacttcaagtacgatgttgaataagagtggtgataaagggcatccttgtctggttcccgttctcaagggaaatgctttcaggttctctccatttagagtgatattggccgtcggctttgcatatatgccctttattattttgaggaattttccttcaattcctattttggtgagagtttttatcataaatgggtgttggactttgtcaaatgccttttctgcatcaattgataagatcatgtggtttttgtcttttgttttatttatgtgatggattacattaatggtttttctgatattaaaccagccttgcatacctggtataaatcccacttgatcagggtgaattatttttttgatgtgttgttggattctattggctagaattttattaaggatttttgcatctatgttcatgagggatataggtctaaaattttctttttttgtaatgtctttacctggttttggtatcagggagatggtagcttcatagaatgagttgggtagtattccgtctttttctatactttgaaataccttcaatagtaatggtgttaagtcttccctgaaggtttggtagaactctgcagtgaagccatctgggccaggacttttttttgttgggagttttttgattaccgtttcaatctctttttttgttatgggtctatttagttgttctacttctgaatgtgttagtttaggtaagtagtattgttccaagaatttatccatttcttctaggttttcaaatttgttagagtacaattttatgtagtaatctgatatgattcttttgatttcatttggttctgttgtgatgtggtccttctcgtttcttattcgggttatttgtttcctttcctgtttttctttagtcagtctagccaatggtttatcaattttgttaattttttcaaagaaccagcttttggctttgttaattctttcaattgtttttctgttctctaattcatttagttcagctctaatttttattatttgttttcttcgggtgcctgatggattcttttgttgctcactttctatttgctcaagttgtcgggacagttctctgattttgtctctttcttctttttgtatgtgtgcatttatcgatataaattggcctctgagcactgcttttgctgtgtcccagaggttttgataggaagtattttcattctcgttgctttctaagaatttccttattccctccttgatgtcttctataacccagtcttttttcaggagggtattgttcattttccaagtatttgatttcttttccctagtttttctgttattgatttctagcttcattgccttgtggtctgagaagatgctttgtaatatttcgatgttttggattctggaaagatttgttttatgccctaatatgtggtctattctagagaatgttccatgtgcgctagaaaaaaaagtatattttgcagcagttgggtggagagttctgtataagtcaatgaggtcaagttggttgactgttgtaagtaggtcttccgtgtctctattgagcttcttactggatgtcctgtccttctccgaaagtggtgtgttgaagtctcctactatatatgtggaggtgtctatctcacttttcaattctgttaaaatttgatttatgtatcttgcagccctgtcattaggtgcgtaaatatttaatatggttatgtcttcctgatcaattgtcccttttatcattatatagtgtccttctttatcctttgtggtggatttaagtctaaagtctattttgtcagaaattaatattgctactcctcttcttttttgcttattgtttgcttgatatatttttttccatcctttgagttttaatttgtttgtgtctctaagtctaaggtgtgtctcttgtaggcagcatatagatggatcgtgtttctttatccagtccgtgactctctgtctctttattggtgcatttagtccatttacattcagcgtaattatagataagtaagtttttagtgctgtcattttgatgccttttcatgtgtgttgttggccatttcatttttccacatgcttttttgtgctgagacgtttttcttagtagcttgtgagatcctcattttcataatgtttaactttgtgtttattgagttgttacgtttttcttggcttttttcttgagttatggaattgatattcctttttgtggttacctttttatttacccctatttttctaagtaaaaacctaacttgtatccttctatttcgccttgtatcactctccatctggcagttcaatgtctcctatatttagtccctctttttgattattttgatcgtttatctattgatttccatgatttcctgttgtgtgtattattttgtttatttatttattttttagaattagtcttaatttgtttgtttttgtgctttccctatttgagttgcgttgatatcaggacgttctgttttgtgaccttgtattgtgctggtagctgatattattggtcatccggccaaacaatctcctttagcatttcttgcagtcttggtttagtttttgcaaattctctaaacttgtgtttatctgtaaatatcttaatttctccttcatatttcagagagagttttgctggatatatgatccttggttggcagtttttctcgtttagtgctctgtatatgtcgtcccattcccttcttgcctgcatggtttctgctgagtagtctgaactgattcttattgattctcccttgagggaaacctttcttttctccctggctgcttttaaaattttctgtttgtctttggttttggcaagtttgatgatgatatgtcttggtgtttttctttttggatcaatcttaaatggggttcgatgagcatcttggatagatatcctttcttctttcatgatgtcagggaagttttgtgtcaggagttcttcaactattttctctgtgttttctgtcccccctccctgttctgggactccaattactcgcaagttatccttcttgatagagtcccacatgattcttagggtttcttcattttttttaattcttttatctgattttttttcagctatgttggtgttgtttccctggtcctccagaagtcccagtctacattctaattgctcgagtctgctcctctgactttctattgcgttgtcaaattctgtaattttattgttaatcttttggatttctacatgctgtctctctatggattcttgcaacttgttaatttttccactatgttcttgaataatctttttgagttcttcaacagttttatcagtgtgttccttggctttttctgcatttatcctaatttcatttgtgatatctttaagcattctgtaaattagttttttatattctgtatctgataattccaggattgtatcttcatttgggaaagattttgattcttttgtttggggggttggagaagctgtcatggtctgtttctttatgtggtttgatatggactgctgtctccgagccatcactgggaaactagattttccaagtagtcagctggtgcgctggctcctagttctgaaaacagtcactgtctgcccgtatttgttcgttttccatctctaagtctgtgcttgttgttcagagttcgtagattgttatgtatgtgatcgattcccttgtttttccgagtctttgttgcaagagggatccgcggtagcgtccacctagtccgccatcttggcccccgcctccacacctaaattttgtttgttgtgtaatcatactcagaactctgacttctctttctgcaaaatggggagaaaatttgccatcttactcaccttggtgaatatggtgatgaccaaatgataaaatgctctgcaaattctcaaacagtattgccagtttgaattaagaccaataagaaccttacaagcttaagaatatacatatgtcaataggtaccaaacccattgccattgagctgattccgactaactataagtcaaaaagtacagacaggctaaaatgcaatgatttacaaagcccttttcttgatatcttccacagactctacccctgctgagtctgccttctggttattggtttcacctgtgaacagttcactgccactgctgacttcaccaaatatctcctttgtacttccatctacattttacatgaactctggagcgattagtcactaatatcaacagtgttgcacagtctaggaacatttattgctcccctgcttggcttcatgtttctgacttggtaccataatattattaatagtcacagggtacaataaaagaaaattaagtgtttattttgtttaggctttagccactttacctacagccttttccattacatttgcacataaatgagcatacgccacattttttagatgcaaatcaggttttaactttgctaatcatatcgtttcctttctggtagtcttctaggccagcttcagttttactccagacgcatgcatattctagcaaatgaagaaatggccgtgtggtagatgtttgcccttttgtgattcattaatagttgtttttgcagagcaactgcattttaaagtccaatgttactccaaacattccttgcaattccaggagtttatctgttcaatttcaggccaaagtcaatttttcaattccaggtcattttctaataaatagttggggacaactgccatggagcatggaatcaaagacgtgaaagccattgcagatgaaatatactgggaccaaattccaacattcagccctcacttttcagtagggcttcaaactgcttagtttctggttcaaacccctgctgagaatttgcatttccaacaagttctccattgagaatttgcatttccaccccaggtatactgaatcatattctacattttaacaagaactccgggtgattcttatgtataacttcctggaaacttgttagaaatgccaattctcagtagggaacttgttagaaatgcaaattttcagcaggtgttagaaccaaaagagctggttagaagctctgctttccagcataagaaactagaaagcctgaaacattcaagtagaacatctaaggttgacacaatgtgtttattccacatttgttgccctcttcaccatctcttaggcaatgtccttttaaatgaagtgtttgttctgccttaaaaagataaagtaatattttacatggcaaaaactcctttattacttggtgggatatttctaacttgatttatatgatagtgtttaaatgtttaaaaggttttgtaaggcaggttttcaatccattgaagaatttagtttcccttgaggttcttgcatcagatactatgtcagaaggcttacttccaaagatttataatccaatctcctcctctgttaaccatatattttggtgagcatcccattggaccagacttggagatttcagtccagcatcatcacgtgaagtgattgcaaacagccctattgtggctgtactccccaactccccatcaatgggctgtgggtcatacaggacttgggtcagctcaccacaatgtatatgagacctctggggcttctaagaatatctctagtggttccccaaacaggttattgtggtcagaaagacaaaaactcaatgttccaagagaatctgtgcaaaatggactaatattcaagcccaagtagataatttttgagaaatgaattacttcttacataatattttatagtttggaaggcactttttctcaatacccagtttcatctttactataaccttccgccaggttccattagccagtttgttaaactgtggcggtgtgcatgttgctatgatgctggaagctatgccacccgtatttcaaataccaacagggccacccatggtggacaggcttcagcagagcttccagactaagacacacggggaagaaaggcccagtgatctactttcaaaaattagctaaaccttttgcatcacaacagaatatttctggtatagtgctggaagatgagccctctaggttagaaggtactaaaatacacagtagccacaataatgaattcgagcataccagtgatggcacaggagcaggcaacgtttccttctgttgtatagggggtcaccatgaatcggagcccactcaatggcaactaaaaacacccaccaccaccttctgagataggcattatgatgaagattttatcagtcaagaaattaagacacagagatgcgaagggattggcccacaaggcacacccaggtctgctggctctggctcatgcttttccttcctcaccgggctgataatacatccagcaacatgagccaaagccgagcccagactgggctatcttccctgcagccttcagagtacagtcaatacatccttctacgacattctcaagccctacttcagtgcgtcaaaactcacccttgtgtcatcccctctgtttgggaatcctgtgaataacagccacatacaccatttcagccacctcctcttctaaaagttacagagatcagtgtgtcacaaagctgtttttaaggactctttatggtacgttcttcaacttttccatagctttacctaacaacacagtcgtaaaaacaatattaattccctttgaactaatagcttatgttagcatttggtttcatgccattttttaaaagaaacaaattttccttgcactgacaatctctcagattttcagtgcatcattttccatttcggtcaaagtactccaagtatgattagaatagtcagagtttttaaaattcccaaaagttctgcattcccatcaccattgttactcatcctgagagggacaagatagcaaggtgcccttcatgaaaaccccctgtctacttgaacagccttaaaaaacaaacaaacaaaaaaaccctacctgttgctgtccagttgactccaactcataacgatcctgtagaacacagtagaacagccccatagggttcccaaggatcagcagtggactcgaactgctaaccttttggttagcagccgaactcttaaccactgagccaccaaggttcctgaacagccttgtatcttgccaacgcctccccacataacggccacatattcctagaacataccctacttcctacgttccacgctttgcatgcacttttggagagctctctcacttccaatccctgtacacttctcagcatttagatctcagaggataaaagccaccttctgtaccagtccagacagctttacatacatcttttcttgctcccacttcacgttccacgagaaagactgtcctgtaactatgtaattctttccttacatatccccctatgctgtaagttccttggggacagagctttcatctgtattcccagcacctatcacactacctaagcacacaagtgcttagcaaatatcttttgaaagaagggatggacgaatgaaattgagatgagtgaatgcattaacaaggaggactaactggggtgtgggaagacaggggtggagtttggaaacatggaggccaccctgtccttgccttcagctctgtgtggactgagcctctagcttaagaacagacacataattctgaccgactctatcccttaccaatgtggcatggatcgctcaatcttttcatctataaaatggggataattgtaacatgatctagaggattaattaatatctgtcaatcctcagaatagtacctggcacacagaagacactataaagctgtatttgttgttgggttgtggttgttgtcatcatcattaccatcatcaaggcaccccacagggaaactgagaataacaactgttgaagctaaaatcagttccactttattcccaggtcctttcacttttttttccccccaaaggttaggtccttgggctccatgctgaatcctcttcccaaattcccaggcttctctaggtgagcttatgtgccatcacagccaaacgtgaatagctactattcttcggctaagtgagagacttacctacagttttgagagactgtatgtgaactaacatagcttaaaattagtaaccgaagtgccattagcagtttgtctttcacagcccattttttaggaaaaagacaatgacgtttctctctaattaattatttcagatgtggtctccctggcaaggaacctggctgttgagtctattctgactcatagcaacccaatagggcagaaaggaactgcactatagagtttccaaggagcagctggtagattcgaacagccaaccttttggttagcagccgagctcttgaccactgtgccacgagggctccaacactagagccattaccaggttctaaaatcaggaggaggagtccctgggtggtgcaaatagttaatgtgctcactgccaaccaaaaggttggaggtttaagtccacccagaggtgccttagaagaaaagcctggtgatctacttcccccaaacaaaaaaaaaacagtcactgaaaaccctatggagcaaggcaagactaatactgtatgtgaccactattataaaaacccatgaaaaggtttacacacagaaagaagcaatctttgatggttacgaggaagggaaagggtggggagagaaaaatactaactaggtaattaagttgtaactttggtgaagagtaagacagtgcacaatactggggaagccagcacaacttgtacaaggcaaggtcatggaagcttcatagacacattaaagctccctgagggactgatttactgggctgaaggctactgggaccatggtctctgggcacatctagctcaattgttataacatagtttgtaaagaatatattctacatcctactttggtgagtagcatctagggtcttaaaagcttgtgaggggccatctaagatactctgttggtcccgccctgtcctgagcaaagaataatgaagaaaaccaaagacacaacggaaagattagtccaaaggactaatggactgagtccagcacaactagatggtgccccactatcacccccaactgctctgacaaggatcacaatagagggtcctggacagagctggaaaaaaacgtagaacaaaattctatctcacaaaaaaagaccagacttactggtctgacagagactggagaaaccctgagagtatgtcccctgggcacccttttaactcagtactgaagtcattcctgaagtttacccttcagccaaggattagacaggcccataaaacaaaatgagactaaatgggaatgggtacaccaactccagcaagaggggacagggaagctggtaatggggaacccaaggtcgagaaggggagagtgttgacatgtcgtggagttcgcaaccaatgtcacaaaacaatatgtgcattaattgtttaaggagaaactaatttgctctgtaaaccttcatctaaagcgcagtaaaataaagaagcatcagactaacaaaaaaaaaaaagaaaaccctatggagcacagttttctctgacacatacagggtcaccatgagtcagggtggactccatgacatcttttttgtttgtttgttttaaatcagggagaggaagtctgggagaggagggggagaatgagcaggcatgaagaatcttgagctgtggctggctaaggaataaacacagaaggatgttgtcattcgatggccactgatgttgcacttgtatggttaatatggcttcctttaatactttttcaaggagccctggtagtgcagtggttaaagcgcctggctgcaaaccgaaaggtcagcggtttgaatctaccagcggctccgcaggagaaacacgtggcagtcttcttctgtaaagatttatagccatagaaaccctatggggtcattctactttgtcttatatgatcatctatgagtcagaattgactccacagcagtgggtttggtttagtttttgtaatgtttttttcctctaaagctaagctccttataagtcaacctattatctaaaaaaaaaaagctccttataagtcaacctaaaaaaaaattatctaaggtgttactaattcgattccactctctcactgctagccaagtgcctgtctcctgtccctcacctaattggggttctcatggcaacacccaggagagggtacaaggcttccctgcctcacctgacaaagttatctttctgagtctcgaacttttaagaccataagttatgctctaatttggatggtaattggtaataaaattttacttatttcttcccgtttatttcaacttagtgtttatgatgcagaagtttgagtgaacttctagaagtcattataatacagtgacataaaaaattctgagagcaaagataagatcactcacaatctcatcatcctaactctatcacttctaccattttaatgcaccaagctaccctttcatacgtacttttacatagctgtagtcatatcctacatacaatttcacatactttagaattctagttttcataacatcgtgaacaccattttccatgctgcaatataatgtttatgaccaccatttctaatgcctgcataatgttttaaatttcttataaattatcttgctatcagccattagtgtggcttttggtttttctcatttttaacaatcctgtgatgatgatctttgtgcatatggacttttggtaacttagctattttgtaaggatgggttattgctccttctttatctcttttgcaggctcctcttctacacccaccctttaaaggttggggttctggaggactccatcacactctttggagccctggtggcacagtggttaagagatcagctgccaaacaaaaggttggcagtttgaatccagcagctgctccttggaagccctatggggcagttctaccctgtcctatagagtcgctatagtcagaattgactcaatggcagtggtttttgtaggagggcgggagctctcctttaccctagatgagctcatctacaatcatggcctcaactccaaaagcattctggagaagcccagactcagagcattaacccagtaacaacgtatcacctagccccactggctcctcaaacactttccaaacactaacttctagaaattgagctaccttctggtggacattctcaggtaatggtgcctctatcgcccaaactcctagattagcaacacgttacaattcttctctctctctttcctccattcccagtaggcccttcagtcttctcagtgctgcccagaaatctttctgccttgatccaggcctgcatcatcgtctatttagatgaaaattgtctgatttccatggtaacaattaccactgccaccagtctgatcttaaaactccccaaataaaagtactaaaaattttaattaggtttttaaaaaatgtcctacagcagtagttctcaaactttagcatgaatcacctggagggcttgttgaaacagagattactgggttccaccctccccgagtttctgactcaataggtctggaatggggctgaaaagtttgcagccctaaattcccaggtgctgtcgatgctgctactctgcgaaccacactttgagaaccactgatctgtcaggtaagttttaaatttcttatcatgcacattttcaaatctgggctcagcttacccttctgaccttactttgggaaattcttccagtgagaattactttcttaccatgctaaaattctcaagtacgcccagttcctctttgctttcagaattgcatctcactgcatcacttaccatggagccctggtggggtagtgattaagagctcggctgctagccaaaaggctcgcagtttgaatccaccaggtgctccttggaaaccctatggggcacttctactctgtcctatagggttgctatgagtcagaattgacttgatggcaacggtttttatccctgtacaggaacccttgtggcacaatggttaaaggactcagttccaaaaggtcagcaatttgaacccaacagccactctgcagaaaaaaaaaatgtggcagtctgcttctgtaaagattcacagccttagaaaccctatggggcagttctactgtgtcctatagggtcactatgagtcaatgactcgatgcagtgtggtgggtgtcactgtatgtgccagatggcccttgtatccaagttttctatttctatcagcaaagagctaccacaaggttagaaactcacacaagtgcctagaccaggtaggtagtgaaaatgcaggaagcaggaggatgacaacctgaggagagttctgtttaaagaagcaccctctacttagctcttaccgagaattgccctgagggtattgccaagtctgtgggtcttctcaaaggcaggcaggtttctagatttctaaatgaactctctcaattcatagaccctggcaatggattcaaaatatttaaagccatgtgctggctgcaataagcgtatctgcagactgaatttagctcaaagcccgttaagtttgcaactatacgtctactttttactaaagacaggtgcagtatctactcctcaatgcatatttcctgattccttccccacatacccaatgtgcacatgcacacacatgtacatacacatacatatacacggacaaaattgtagtctgttcctatggcactttgttaaaatttccatgaaattgtttaagctatttacatatgtgcaactctgaagacatagtaagaagcttaagagcagaaactgggtcttatgctttatcctatctttctttccaaaaatagtgcacctaacaaatatttgctgaaggagggtatgcagaaagggtggaagactgatggtgtgaatgaaagcaaacgctccttttacgacagggcatacggcatttcattccacacgtcagaactcccctttgtgtggactccctcagtgacatgttagatttcacacagtgaaaaattcacatttcagccatgctttcaacagatgcttagaaacaaacattggtccaagtaatctaacatcaacactgggagtgtgtggatcaagcaacattatcttggtctatctttcaagatggaaatgatgggtgtgattcatgacaacggttaaaggcttcagaatccccttattgtaactccaggtgatctttcacacatatgcgattaagcacagcatttagaaatgggaagatttatgtgtcaaggaaatagccagctaagtcccacctatctaacctaaaaacaaaaaaaaagtgacaacaatgacagaaaaatgcagttccgtactgtgccatcacaactgaagccccgccagaaagttcttctccatcctccccttttattttactcttggagttatcatactcataggcctccatgtgatttgaaagcagtcaaatctaaaacaaagtattcaggttaatttatcagagagtttcttgagccctaaagggtcctggttgacaaataaagaacaggtattgtcaatggtgccctcaggttcctttttgtggatataaaactcattgcagactagaagaatggaatgcaaatcagatttgcctttcatctttctccgagcagtaaagcatggggaaagagaaaagcactttaagataattgtgattttcttcaattatataacatcataacctgtagggctttcattaaccaagtttcatcagttctaatcggctgccctcacattggagaggctcatgccaggaggtaattaaagccttcaattctgctgacagcattcttcagtttccagagcccttatcaatggtagataagtaatcatgcaacacgtgatggccccagatattgccttccgtgccctggctttttagtagacaggctcgagcccacattcttaatttactctttatgcgtacttgccctaaagctaatgatattcatcagtgtaagaggagagagagagagagagaagaaattaacaggtaaaattatgccttaaaatgcttaaatagagccatctgtcttcagttcacttttccccattcacatccttcatgctgttatagcacattgatttttatattatagattcatgttgtctaagaaaatgcagctgatttctcggatcctctgatataaagtgtctaaatcaataaggtatttgctgaggatgctgttataatcatatcttctttttccgaacacattcccatcgtgagctaggtgagactgattcacaccacagtccccctatttgccatcacccaagtggccgcaattttagagccaagtcaaacttgctcttccatctctcttctatcagtttaaatcagggcttcgaaccagttcggtccaatttgaaaccctgctgagaatttgcatttccaccccagatataaaaaaaagaatcaaaatctactttttaaccagatccccaggtgattcttatgtataatacattttgagacccgctgctctactagcggaaacctggtggctgctctactagcagaaaccctggtggcgtagtggttaagtgctacggctgctaaccaaagggtcagcagttcgaatccaccaggcgttcttggaaactctatggggcagttctaccctgtcctatagagtcactatgagtcagaatcgactcgtcggcactgggtttgggtttttttggctctactagcggttctcagaattggtccctaaccagcagcactggcgtcacctgggaactttttagagctgtaaattctcaactgatgcatttgaatcatggtgttggcaaagaatattggatataccatggactgccagaaaaacgaacagatctaccttgtaagaagtatagccaaaatgctccctagaagcgaggatgacaagacttcgtctcatatactttgaacatgttatcaggaggcaccggtccctggagaaggatatcatgcttggtaaagcagagggtcagcgaaaatgaggaaaatggattgacacagtggctgcaacaatgggctcaagcatagcaatgatgagaggatagcgcaggacccggcagtgtttcattctgttgtacatagagtcgctatgagtcagaagctactcgactgcacctgacaacaaccaggcacactcacaggacattaaagacagaatgaagcttagaaatcacctcctctaacccttttagtttaaagtgaggcctaaaaatatatataaaaataaaattgaaattaaaaaaatgcaaattttccacagaggtttgaacccgttcaaagccctggcttaaatggtttcactcaaagcactttttaattatgatgctcccttgtggagaaaaataaacgttggtttgaactactctgaacataattaaaggagccctggtgccttaaaagcttgtgagcggctgtttaagatactcccaccctgtctggagcaagggagaatgaagaaaaccaaagacacaagggaaagattagtccaaaggactaatggaccacaactaccacaccctctaccagactaagcccagcacaactagatggtgcccagctaccaccaccaactgctctgacagggatcacaatagagggtcctggacagagctggagaaaaatgtagaagaaaattctaactcacaaaaaaagatgagacttactggtctggcagagactggagaaaccccaagagtatggcccctggacatccttataactcagtaatgaagtaactcctgaggttcactcttcagccaaagattagacaggcccataaaacaaagtgagactaaatgggcacaccagctcaggagcaaggacaagaaggcagttggggacaagacagctggtaatggggaacccaaggtcgagaagggagagtattgacatgttgtgggttttgcaaccaatgtcacaaaacaataggtgtattgattgtttaaggagaaattattttactctgtaaaccttcatctaaagcacaataacagataaacaaaggagcccgggtgatgcaaccgctagtcagcaaaccaaaaggttggctattcaaaaccaccagtggctcctaccttttggttagcagccacagctctcaaccaccgcaccaccagagctcctgccactgagaactaggtaggtagcttattactggtgcctttccattaggttatatgagaaacctgtggttttccaaatatgacacagaaaacccaaaaatatccaacaggaaaagccatgattatgtttgcaagccttatttcacaggaaaaaaaaaaaaaaaaggcaaaagttgacaaaagtttataaaactaacacatccaataagcatcacctagtagaacgctcaacatatataacaatggcctccaactcagttcagctgagcttcatgcatttcaaaagggacccaccttggcatgaaatgcattagaacctgaataacgtcttacctctgaggtccagaggcataaaaaacggctggcatacagtttagaccaatggtaacgaaagggttaaacatcagttaagcactttttccaaagctgttgcgcaatatgaccttaattttactttcttagaagaaacaaaaggagtaggaagcattgatccttgagcccaggtattctgccctaaagtcctggattctatagggtcactatgggtcagaatcgactcgatggcaacaggtacggcctggattcattagaattggctgctcttgctataggttcaaggttaatgagctctgaccactggcttgagcacatgattgaagatttatacaactctccttttcataaaatcttcttgcctggtttatagcagcttgagcattctcctctatctgctccagaaaggccagtctgctctggacgccctgcctgtgacttacgcaccttccacttcatcagtgtgcttaatagaacattcttttccatacactttcctgctattcaatttcacatgtatccacatgatacctttaaaagatagaaataaaatacagaccccctgcataaagaaccaaatcttcaacatgttgtttcgaacttattttctttacccagcctgtcatgatgacttcacccggttccaatcatcccagcaatcagagcagttactgccaagtcgactctgacccagggcaaccccacgtggttcagagtaggactgtgctccatggggttttcatgactgtgaccttccagatgcagatcaccaggcttttcttctgaggcacctctgcgtaggtttgaaccaccagccttttggttagtaactgagggcttaattctttgcaccacccaggaacctgcatttcattttacaccagcagttagttttgcattatatatatatattcaaatatgtatttctggtggcgcagtggttagccactcagctgctaaccgataggtcggcgatttgaacccaccagccactatgcaggagaaagatgtggcaattcacttctgtaaagatttatagccttggaaacctcgcagggcagttctaatccgtcctacagggtgtctgtgagtcagaatcgacttgactgcagtgggtttggtttgttttggggtaatacatattcctgatgtaattccctacatttttcccagcaacgccatttgatagtgaactctttgagggcaattacctttgcgtcctttaaaatttactccaacagacgctagaactctggatttggattactctaccattaccagcaccggggccttgagtctttccactaatctttcagaggcttagtttcttatcactgaatggcgctaattatgctacctgccctgccatctcaacaggcttggctgtcagtgaagatcaaacaaattatagttggtcagggcactttgtaaactgccaaggcccatgcagatgcaatcataattatgcagaataaatactgctgacagacaaaccagcaaagatttaagatagacaagcagggtagtggtttcaccaatcttaccactgtcaactaacatgcattttaaaattccaactcttttctatccctgtagagaagcagagcccttaagacccaatacgtaaagatcagggaggcacttgaaatgtataaacaatacctggtgtgagatttaggaaggtgcgctggggactgtggcaaaatggagagttcacgtctgttaaagtggagacccggcacttggtccagctgttaccatgcagaaacgtgagccaagtatttcaaggggaccagcaatccataattgttataagtgaattatttaggttttaaaattgttggcctctaatttaattcttccaccacccatccgtcagtttgctgcactgtggtgctaccagtatttcaaatactacaatatcacccatgttggacaggtttcagtggagcttccagactatgacagactaggaagaaaggcctggaggtacacttccaaaaattaaccaatgaaaactctgtggataacaccagaatattgtccgatatagtgctagaagatgagctgcctaggtcggaaggcactcaaaatacacagcagatgtaacaagagacttgagcatatcaatgattgtaaagatggcataggaccaggaaatgctttcttctgttatatatggaatctccatgagttagagctgactggataacaattaacaattcagttcttaaaataaaataaacatctaatggccaaatccaccatcaatgggctagataagcctcatgagtcactaaagtttgcaacttctggctcaatgtttttaaaaaactgagcttggatgagcaaaagacaagtgttcctggaccccagtgagaactagatctggaccaagctttctggaatattcaaaaggagtattaaacctggtccttgttatccaaaaaaaaaaaaaaaaaggagcaattattaagtgtctaacgtttattcagttattttacatatttaaccatttacttcagtgtaatcctcatgaatttatacggtgattaccacttgaaccattttactgatgaagtaaccaaggtacatggagttacttgcccaagagcacatgacataaccagtaagtgctggaacaataattttaactattctggctattgtcaaactcaggtttctcctccctggaaaggagctgactcaaatgctaaagactagagaataattggaagtgaacctgggtggtgggaacaccacaagcctttggtgaagaatccctcattcctaaatacccagaggaggatgtgcgttttgtgttagttaatattggataaatggaagagaggcagagggaacagcatgaacaaatgcctagaggggtatattatcaaagtgctaatacatatatattttttactctaaccccctccggcatcaactaaggaccatttttggttttgcttttctcagtgttcatccatattttgataacggcaccgcaagcccggctttcctttgaggaaatatccgggacttctcagatgctgagccacagccacgaaggcaccctcctgcatgcagactctggaagtgaatgggagttaaccccatagaggcaatacagaactaatggtgtcccttcaatctcctgggtgctcaattctactcttcagaaagcaccagcttgaatgaccactagctatccacgatggttgccgatgcaatcatgcacctttgcatgatcttctcctccttctctgattcactcttcctcacccccaactcctattgcctggaatcacttcccaaatgaactacctactccaagtccttgacttacgctctgcctttggaggaaacccaggttaagacaagactgttcagcttttgctgtgatactctgacctattctgtactcttctaataacttccttgttttatttctgttataatctttgccatcgggtcaattccgactcacagagactctataggacagagtagaactgccccatagggtttccaaggagcgcctggtggattaggtagagttaactgaggttccgtgctgccaaagaaccctaactgatccactgccttattttaagtggacgatattataccactggatattagaaggaaagttctgcacacatacaaaaatataattcttgctgaaaatcagtgtggctgttgctttagatggcaagaaactctgaaacatctgacagtgttattaagtgtctctcgaaaaacaaacattatggatgggctgcacagtcatctggtggtgattgatggtgttcctgccaatgcccacacctggtatgatgcagtgctgaaatccagcatttcctctgataactgcctggacattcatatgattttacacctattactttcacctatcagctctctaaaatctctattctgttgttttctcctttaaggaccactccctgtgatacagtaatcctcagaggaagacacaaattgctttctacttccctagataaggaactggggaatagatgtgttgtgaaataaatcgtgtaacccaaaagtatgtgctgtaaatcctaacctctcttgtggttacactaccatttgggaatgggttgtgtttgttatgttaataagacaggattagtgtaggatgtatattgaatcaatctcttttgagatataaaagagattaaacacaagctagcaagcagagatgggggaaaagacatactgagccccatgaagattgcccaggagcagaagatcggaagacacaaggacttctcttcagagccaacagagagaaaaagccttcccctagagccagtaccctaaattcagacttctagcctcctaaactgtgtgaaaataaatttctgtttgttaaagctacccacttgtggtatttttgttatagcagcactagatgactaaggcagaatttggtatcggatgagtggggtgctgctctaacagatacctaaaatgtggaagcggttttggaattggctgataggtggaggctggatgagttttaggtgcctaactgtaaaagactagattgccttgaagagactgttggtaaaattatgtatatcaaatacagtcctggggagggttcagaagaagagagaagagcgatagagaaaatctctatcatcttagagaatacatatggcatcagcaacagaatattgctagaaatgtggacattaaatgtgtttctggtgaggcttttaaagaaaatgatgaatatatgattggacaatgaaggaagggtgaggctttttatgcaatggcaaaaaaacttgtctgaattatgttcaaacgtttgatggaaggtaaacttgtaagtgatagacttggatatttggctgatgaaatttctaagcaggatcttaaaggggtcgtgtggtttctttttctgcttaaagtaaatgctaaagagatgaactatgcaaaatgaaaacagagattaaagatttggaaaattctgttgtacaaactaggggcacatgttccagaacgttcaccaaggctgtggctatacaatcttttgctaaagagattaaacctatgactgatgggtctaaccaactaccacagcagaaaacccatcagctcagactgaaagggacagagaaagaacaaagggaaagaactcttgtctgcctctcgaaattctgtaggcaggaaacaagccaaaggatctacatctattgtcctccaagaaaagaaaaggagcatgcctggagcagctcagagatcagcaaaactgttggaaggagcaagggaagcagagctgcctcggtctcaaagggtggggccatggtctcctggatctcaacaggttgaagcacagcctcctaggtttcaaagggctggatctttgccagctcagtctctgagtgtggagctgccattaaggtgtaacggggggatggggctgccacccaaagctaagggggtaagactgctatgccccagggtcagaaaaacagggcctggtggggccaaaggggtggggttatcactcagatggactaggagaatggggctacctaaagatgagggagtagagttgacatcccagagggcctggaaggtggagctgaagcccagagctgaggagcctccacttagaatctagaaggcatgaccaacactcagagtctagagggcagggccatttcccagatggtctcagagaagaaaggattattttcacaccttgagagctaatataatttgttcagctgggttttggacttgctttgtgcctgttatcccttccttccttccaatatctcccatttctaatggaaatgtctaccttgtgcctgttctatcattgtacttcggaagcagataacctgtattctatatttcacaggttctcaggtggagaggaattttgccccaggatggactatgcctaacatctcacctatatttggtttagacaattcaaaagatgcgattttggacttggagttggtttaagattttttggaagatgttatggggtaaatgtgttttgcatgtagaaaatacatcaattttggatggccgaatggtggaatattatggattaaattgtgtctccccaaaatatgtgttgtaaattctaacctctatgcctgtggttattgttccatttgggtataggttgtctttatcatgttaatgaagcagcattaatgtagggtgtatcttcagtcaatcttttttgtgatataaaagagattaaatgcaagctagcaagcagagatgggagaatgatgatgccaagccatgtgaagattgtccaggagtagaagctcagaaaaagcaagaaccttctttcagagccaagagaaagagaagtcattcccctagagctggcactctgaatttgaacttctagcctcctaaactgtgagaaaagaaattctgtttgttaaagccacccccttgtgttatttctgttatagtagcagtagatagataagacaagatgtaagacccaaacttagtttatccactaaatctatcagcttttcattgtcactttatataaatgggttagatgcccattaagtccaaatacatctatcatccatccatccattcatctagctatctagctaactacctatttccttccttccctccttttttccttccttccttccttcctccctccctctctctttttatctatttatcatctattatcctttctattacatggctcaaacatacaggtatagccctgagaagtggccttttctaaaatctgcaccccaaattgcaagtagaaaatctacattattacagtgcatctggtccttgttaatccttagttgtgtcttttactctcatgatttctccagatgtgtgagtctatctcatacattaatattttacataaactacactaaagaattgttgacacgaagttgagactccttggctcccagcactgcctccatacaggagcagtctagatctaaccaaccaaatgccaagaagatcataaaacttgcaaatgaattcaagactccctctactccatgtcattgagtgtgtacactttacactctgttgggtttacaaaaggaaaaatgctaagaacaatccagcaatttactaaagattaataagtttttgagtacttcactaatatcctacagaataatggatgttttctttcctgaaatggaatccaaaagaaagctgttttttttccgaacaacagctttaaaaatagaactcgttacttggaaagatttgtgagatcttcttgaacagtggcttctgaatgtagttgatcatcggggagtttttaataaaaaaagatttcagggtcccgcccagacctatttaaggagaatctctggcaggtagggccaagtttccctggtaattccgatattcagccaattttgaaaccattgctacagtctgaatattaaatattgccttagcagttaacattttaatgcctctgattataattttattctagcaatttcctttggatttacattttggaagaaaagcctggatgaaaaattatttggccatcattttgtccaaagcctccattttgaaaaagctcttcagaaagtttaatgagaacttcaaatgatgaatttgcttttcattgtcctgattctttatgctgtggttggtgctggttgctcttccatcagaactgtatctctcaaaacacaatgacaagcctggggggaggtgggaaattatttccatcttggctgaagcatcaggattgagtcagagaactggaaaggaccagaagagaccatctggttctgtccctgtcttcatgtggttgagattagcctctaggaatttcaaggcagagagaatctactgctggtgtttcaatatcctgataataagtaaagtcttctttaggaccactggtgctactaccaagcctccatgtccagctcccctttcaacttcacttctatgttgattgaaaaggatgcctcttcccatctctttctaatttattccctagaaccaagaagttaaacttagaacaacacaaaaggatggattttaatcctaataggagtatggtaccataaagagaaccctaggctgagtcaggaagcttagacagtaatttcaacactgtcactaacaagatgtcaaaatcaggtataccattaatatatcatgccttagtttcctctttggaaatcaaagttgacaatctctttttaatacccttttgggcttaagtattgcatatgtctaccaaaccatcattcatttaccccttcactgaggtctttcaatatgtcactcaatgagctgggtgctgggcaaaagtagggaataagacaaacatgttctctgatcacaaagaacttatagtcataagggaaaaagacaattaatgcataaatgataaatatataattacataaagattgtttctttagaggaaaagaaatatgatgagatagaataaaggaaccatttagcctacaatttttcctcccttagcttacctggccctctaactcactaaaaacacggaaaggtaaatggtcagggtattccaagaattctccacatggactgaatttacccatccacaagcaactgatcaatcttatcagattttcacagcttcaagatgactacatttatgagaaagtgtccaagttttctagcagttttataaacatttttgaagaaagtcagtggaggctctaaaccttacagtctaaagagacatggccccaatgtcagcatcattgattgctaagaactaatgataaggttaaagtcataaatttaaacctcagataagacattagtttcacaaagaaaaactattttgtggccacaaaataagctattaacattggcccttctctcaagcatgtgtcactgaatgtaaaggaacccagtagtatataaatagcttcgtcgaatctaccaccactaacagaatacatcttctgtggcatgctctttggtgataatgggggaaggagtcagtctgatcttaataatccccacatacgagcttatattttacattgtgtcagcatttgtaactgtccaaaatgtctttagaccagttgccgcatatgatatacccaaaaactctggtaggcagatgggacaatgtatggtatcatgtggccatctgaaagaggaaaatggtgggctaagagggttgtaagtaaatctctctcaaatcatgtagccaattggtaaatatgcacacacatgcattcacatacacacacccaagcttgtgtctatatctaagggttgcttacatagagggtggtggaggcaaagtccacaaggggtagattatgtagaagagaaggacgctgggtaacacaagtggtttgcaattagctgctaaccaaaaggttagtggttcaaagtcatccagtggctgcgcaaaagaaaaggtctgacgatctacttctctaaagattacaggcaagaaatccatatggggcagttctatcctgtaacgcatggggtccccatgagttgacttgatgacagttaacaataacatgtagaatagaataaaaaataggatatattaatctcttatcatcctataggataaagggttggcagttcgaatccgccaggcgctccttggaaacatctatggggcagttctactctgtcctatagggtcgctatgagtcggaatcgacttgacggcattgggtttgtttttggttttatcatcctataaaagtccactccattctttctcagaaagctgagttgccagtgccagtggctatactaaatgctgaagtaggtagacttatgtgcctggtttgcttgtttgttttttaaagaaaaaagctcttaggtgagacaccacagttcttggttaaatttcatttgaaatctttcattatcatctttcttagcagcggcaatgacatcgccatcatcatcatcattactcctttgggatggaaactcaaaccccactgccgtgaagctggtcttgtgccattgatagtgaacacttgttgtcaccttaagtgcattcttgtcaatccttcatacgtccacctgcagtttaacataggaatatgcctaaacaagtctgaaacagtattagactaccaaggggttaaaattcaactcatgtgaataagtgaaatcagccccttcagctaagctgacctcatgaggttatcagagagaaattttgattctgtgacaggtggagcagtgaactttaaaagatagcttttcctctcggcaattatgtgagaggccaggattttgatgtagctaaatagggtccaacgctatgaggagttccttcttgtctttgttctgattaaaacaatcagcaagccattcaagagaatctttgatggacaccagttcattcaatgggtcattgtgtttcctgtaattcagtctttggacactttttcacaaggccagtcattggaggggacactctttggagaagacaagcccttgaggaaacaatggttacagcttttctgaactgcattctggaaaacccagcccagtttgccgctggggtaaaaggcagtgcctggtcctgcatctctaaaatatggcttaaaaatagccgggcacgttcctgttgggagccctcggtaacagccgttcatagcccacatttctttcatgcctccctcctccgccacacagaaaacaacaaactagccctggctttaggcatggacattattcaacattaatgtgccttcagaaatagcacaggaagagtcatagacacaatgaagggaaaaccaaggaagagtggagagaacagggaggagacacctttaaacaatgagaaatttaaaataggcagcaaggcaggaaagaaagggcaggattgggaaaagttgactctgagatgtgatatgctggtgtgtaaagggcacggtacaggtagtccctgacttctggcagcgctccattccaacgactctgtcgtaggtcggatatctcatttatttttcattattattgccttttattatcagtacctttataaaaccaatcttttgtcttggggggttggaaacattacgtatgaacttgcagatatgatcacatcagcagcttatgcagtgcaacactgtttgtagtacgtgttactaatggtaagatattaaaaaaacaaaaactggatagcggttaaccacagatgtttcgtaagtcagggactacctgtaatggggaacagaaaaattaaggttttcattggctctgatgctaattagccatgctttcttgggcatgccatttaacctccctgggcctcattgataaaatggtccaaggatggaggaactagagctagtgaatctataaaacatcccatctgtcatgaattgaactgtgtccccaaaaatatgtgccaacttggttaggccatgattcccagtattgtgtggttgtcctctattttgtgatttttcctgtgtgttataaatcataatctctgcctgtggtcaaagaggattagggtgggatgtaatacccttgctcaggtcacattcctgatccaacgtaaagggaatttccctgcggtgtggcctgcaccgccttttatcttacaagagataaaaggaaagtgaacaagcggagagttggagacctcacaccaccaagaaaacagtgcctttggatccaaggttctggtgcagagaagctcctagtccaggggaagactgatgacaaggactttcctccagagccaacacagaaagaaagccttcccctggagctgagaccctgaatttggacttctagcctactagattgtgagaaaataaacttctccttgttaaagccatctacttgtggtatttctgttatagcaatgctagataactgacagaatttggtacctagggagtggggtgctgctcaaacagatacctaagatgtggaagcagttttgtaactgggaatggctagaagactcagaaggaagtaaggagaactgttaacaccagagaaggcgcagatggtgagaaacagcaacaggggccctgcagcagcagcaaaccagcagcaacagaaccaggagaccagcgccaggcagcactggagccaacccacagatcaagagagctgagtgcctgtgcacaggaggcttcctggcagagctgggtgcctctaggcacttatcggtggagctacagagttttggaacacttgcctcccagcacggcagatgagggtgtgaggcccaaggagctgagaggccaagaaaccaggatacagaagctgaagagacaaggagccgagctgcctcagtctcaaaaggtatggccacaacctctgggtttcaaagcgtggagccatagcctctggtgtttccaagggtggagttaccactcagatggactaggagaatggtgcacctaaagtggtaggagcagagttgccatccaagtgggcctggaaggcagagctgaagcccagagctgaggggcctccactcagaataaatatctccttgtcaaagccatccacttatggtatttctattacacagcactagatggctaagacatcatctacttttaaaaacattatattgtatgaaagtataggctacattggctattgggctttgaaggagctggaagactggatttaccttccattcatttaagttccaatcccctggaaaggggaatggaaatttaagagggcattaagcagtttacagatgaggcaaacaagcatgcccagcttcctgtccctctctttcccctgtcctaggagggctgcttgaggggatggtgagaaagctgacaatcctccccctctcccccgacctccccaggctatagcagtggtacccaagggagccacaaggtcaaattctcagagacctccaatcacaaagtccctcatgtcttttctggtgcctgtggacttgatttgaactcacaggaccctataaggcagagtagaactgccccctagggtttccaaggtatgcctggtgggttcaaactgtcgaccttttgtttagaagctgtagctcttaaccactgtgccaccagggaccacctgaaggttcctttccaaaggcttacaaattcaagatggcaaaagacatggtctgtacagcatgtggattaagtacagctcaggtactagagtcagacaatagatttatgacccttggtaggtgacttcatctctctctgatcttcagttttttgtttttaatttcccaaaatggagaccaagttaagagttttacatgtagttatcacagtgcctgacacagaataaacactcaatatatattatctactactatttgttggaaactctggtggcatagtgattaagagctatgctgctaaccaagaagttggcagttcgaatccaccagacgctccttggaaattctatgggagcagttctactccatcctatagggtcactatgagttggaactgacagcaatggtttttttgtttttttaattttatttgttagtgttattttcatgaaatgttttatttgtgtagcctgaagaaaagatttttgttgactgtttttcctaggtcctttgaactcctgaattaatctatcatctttggtgaaaaaaaaaaaaaaaaaacttctagcatgggctggctaagcagcacttgattagacattaatgtaaaaatcacttcgtaagaccctaatgtgtactacttagtgaataaatcaaaacattgaaaactgggagccaactttagagttccctagggcaacagatgcaaactgggttgagtaatgcaggagaagaaacattcctttccagcctatgatatgcagagtatttcccttatacctctgcccctccctcaggaaaagggacatagcacgtctccattttgacaatctcaaaaagcctttcatgtctaagaatgaagtctgttatcaaaacaagattgggtatttcctctggttctgctgtggttgagctgtgaagagaaattagccaacaataaatggaaacggttggcacacgtgcttatctgaggcaaggatcctaatgtacacgtcaccctttgcacagacatggggttagggactatttcatattcagggagataaacttcaaaatgagtgacatttggaaaatatggagacatttgggcagaatttggagaatagacaaccaaccgtccagagggattcatgagagttcctatataaaagcaagggtttgacagaactcctattttctaccaatttttacttcttaaatcatattatccaacttgatattgttctgttatagcaaaagagaatcacggaattttaaagttgggagaaaccttataaaatcttcagttgaattccttcattttatttgcccagacaactacttgcgtgtgtatcttaaatagaacctgtataacctaaatctcagtccaaggaagttatgctataacatggggctgtattttttgctgggcgctgaatatatctgtctaaatgcccaatgcactgggtgctgtaaattgggcatttagacagatatattcaatttgaagtatatatttgtggtacaatgaattgcttaaattgcttatggcccttatagccatagtctttgtgacttacacacaatgattgagtgggactacataaaagaagtatatggaaacctaatgaagggattggtcagttttgtcatccctctaggcttaaaatgagccatcccagagtcaggaggagaggatctcaccaccaccaataaagaagagtcaggagtggagtgcatccttgggacctgggatcctcgtgctgagaagctcctggaaccaggcagtgagagaaagagagagtaggagatgtaacaaggaacatggaagacaaagagggagagctgtaacaccagagacagtgagaagcaatagcagagaaacggaggcagcagaaccaggaggctggcaggagaccagcaagagactggcagaagatggtgtaatgggctttgatggcccatggagcgagagagctgagtgtctttgggaaggaggcttgccggtggagtaggatgcctctgggtacttggtagagctagagctgagcaccttttggctgaggcttactggcagagtagggtacctcagggcaattatcagcagagctaaaagagctttataacacttggccaagcagggtagaggccgaggggccagagagaggcatgcctgtaggcacggttgagaagaaattgtcctgacagaagaactgtattttgagcgttcctgaacccgaattgtaacctgttagttccctaataaaccctataactgtgagtatggtctggaagttctatgtggccattgcaacaaatcaccaaattcagcagagaagtagagtgttctgtgggagggatggttgctgttagaactggtaaaaagggctggcaaaataaggtatgtctgacctccacctcataccaatcaaccttggactcttcattctcctttccccttgtgaagttacaggaggtcagatgcctctggcataccattttttacaatacctaaggacctaccaaggaaaacaaaacacgaagaaatccaaagttcaactaagtggtagaaaatgtaataatcaactcagtaaacctgtggaattcattctacacaggaaactaaccaggctttgaaggggagatttccacggcactaggaaaatggctggagaaagcagcctctggatcccggcagcacagggccagggatctgagacagggtgccaatcctatcaagattcaaggacttctccttggcaatgttgtccttttttgacatgacaatttcccgaatgtccaagttaggagcattcttgacaaagctccctctctgcccaacatcaatgaataagaccccggagcccaagagctacagaagccctcactcccacttgctgagtggagtctgcctaggagacaaacaggtccccaaccaagtccagtatgggccatggggtatagtaatggtgctgccagtttccccagagtcatgaacccaaaaacccactgccatcaattccaactcatagtgaccctgcaggacagagtaaaactgccccatagagtttccaaggagcgcctggtggatttgaactactgacctttagtttggcagctgtagcttttaacctcaacaccaccatggtttccccagagtcctgagggatcacctattcccaggtgattccagagttggtccagaaagccacacacttgaaacctgtcaacactgtctttcgatttagcacatatactgagtgtacaataaagacagccccatggcaataattgtgtatgcaggtcaagtccaagagaatcaccaaggtgatgattgagtccaagagcatctctgagcaagtggagccagatgggcaagaagaagaaaaggcagagggcaaaggcaaaagattccactaaaaattcaaatagccaaaagacagaaagagccaaaatgtccaccaacagatgaatgaataaacaaaatgtggtatatacatacaatggaatatcactcagttgtaaaaaaaaaaatgaagtcttgatacatgctacaacatggaagaaccttgaaaacattatgctgaacgaaataagccagccgcagaagaacatactatatgatctcacttatatgaaattagcagatagagcatatggaaaccaaagatttttaatagttaccaggagtgagaagatgggggaaagagggagtttttgcttggggagcactgagttaatgttaacggtgttggaatactttggaaaaggagagctgtattgactacacaacataaagaaccaatgtaattagtgccattgcggtgtaaatgtagatactgtattggtggatgttttggtatgcatttttttttttttcaccacaacacaaaagttcaaagcacagtctctagtgcacagagcatactctgcatggtcagcataatggtggaaaggtctcaagctgagaaggtttgcttggaggaaaagtcaaacgaggacacaggcagaaagagtcgccttgtatatcatcagcagcataagccaacatatttaaccccgtggaatacagccactcagaaccaaggctgcgagccccaggcaaacagagctcacacggatgactacaagtttttctggtgcctgattccaaggaaatgttcatttttagccaaaccctctttgtggactcaagctctggcttttgctttccattccctgagttgataaactgagctttatggcttctactgagagctgtgagctttcttcaaggagaggtctaaatgaggcctgatgcatttccaaaagaactagaggaatcttcagggaaacattaagctgtggaaaagggaaaagaatagaatttgatattgagaggaggagggcatgaggaattttcaaactcatctcaaattcactgaagatttcttatccataacactcagtattcattcattcattcattcattcaatatttgttggctgtctataacatgccaggccctgttttagggaccagagaaattaataaaactgccacagagtccctgggtggtaccaatggttaagcgtgtggctactaacaaagatgttggcagtttgaactcacccagaggcattttggaagaaaggcctggttaggcctggtaatctgctttcaaaagggcatggccacgaaaaccctatggggcagtcctgctctgcacacatggggtgcaatgagtcagaatcaacatgacagcgaatggtttgttttttaattttttggtggagtttgcaaattggtgtgggaaataaacaatacatacacaaacaattaagcatgtaatgtaatgtaacgacagttgctctgaatgaaactataatagagatactatcttgagtgccaagacaaactagtcttttgatagggtggtcagggaaggctgaggaggaaccaggtgagcagaaaaaaatcccgttcccatggagttgatttcaactcacggggtccctataggacagagtagaacggcctcatagggtttccaagaagcagctggtggattcgaactgctgaccttttggttagctgctgagctcttaaccactgtaccaccagggctcccagttgagcagaggtccttataaagtgaggaaaggagtcctggcaaaatgtgaaagaatagccagcctttactctgaggagatgtgagcaaagtttgttcaagggcctcaagacgagcaatatagctaaagccaaacaggcaggagataaagtaaaagaggcaaccgtcacttcctgtagggcctgttggcttaagagtccagcacactgcttgccttatttaggtctgcattttatttatgtctgttgataagggtttgtgaatgtttaatgtgggtctttacaaactgactgatttttctcatgcatttttattgctcatattgtaggcaggtctgcttttccctgtcttctgtatgttgctttctctaggaacaaccctcttctgaaagctcttctgtaaagtctccccagctactccaggccagaatgccttgctcctgctcagatccaattcaccttctgactgtaccacttcccatgatactgttcctccaggttccatgtgggatctagttggcttgtgtaggtccatcatgcctcaatatgggctttggagtcaataacgatgtgaatatgaattcctgtcccaccactcactagttgttaattagtttttcaacctcacctgcaaaatggggacgatagcactagtatctactttgtggtgtggttgtaaagaggataccatatataaagagagtgctcagtgatgggagtagctgccagtaggtctgcagcttctcatggaaaggggctatgtctttgattttaagttatatcctatagtgcctataacataatatgttccctatcagtggtctttgacagtagcataacaggctccagaaagcactggatttggaattatcagggacagatgcctttccaggctctgtcatgtactagttatatggccaagagcaaaattcatttaactataaatgagcctcagtttccttatctataaaataggcataattctgataacctcataggaatattaagtgtaatacaggagataatacatggaaagacaaaatcatttcctgctctaaaattctgactctgtgactcttaactcttagtgatgtaatataaaatctagttatgggaattcacaattcttttaaaaaggaattgatggactgaatgctttagtctatggactggaagacaaggaagtggttggagccatcttgctgttgtccagaacagaagtcccaaggagaaaaaagaagaaaaggagaaggccaatgtttaaggtacctatgactcaccgcatgactattagaatctgaaataccttcttccaaggcgaagggcattaatggcctttgagatgataaacctgacaaactgctctttattccagcttgagtttctccatctgaagcagtcatgtgatgctacaaacatcttgctgagtagcagttcaatgttgggtgtagctaggaaaggtcactgtgcctgcacagacgtcatcagcaactttctgcaattctaagatactttggccttgatgggagtcacatttgctgatacatttcaaggtgtttccaagtacgccagatacataccaatcaaagaactggtaggcatgcttatcaatgcaggcccatagtgaaggaagaaattagactttgcccaggaaaaggaaaagataactgataagtaacaattaccattaaccagcgaccaaatacctccaagcattcatatgcaagactcatcatgactttggcaactgtgtgaaatccaataacattatgggcaccaccaaaatattttgaaaacccaatctgcaggtaccaccagggcaggggattttatctgttttgttcactgatgggtcccaaacactgagaacagggcctggcagatagtaggtactgaataaatactgaacaaacaaataaatgaatgaaagagaatcctatttcagtttttcctacaggatccctaacccatttcacaccgcattgcaaagcggtttgtagttaactcgttcatcatcatcctccacacaattaagagctttctttccactaatcattttatacagctaacttttccatttgcctagaaagcagaaagagtaataaattagaatggacagtgccacctaaaggaagaaaagcagtgaagtgaataaatgaagtgactgaagtcaggcagaagactgtgacaaaggagaggacacagaaggcccaagctcagccagctctcgctcaccttctggaaagcattaaaataaagggatagaggccaggcttttcctccttgcccaagaaatcatttcaacatcagggaaggctgggcttatgagaataaattgatcgtcctttaacttggtccccatgtctagtattcgggttcagagatgatgtcactggccatgatgctgcctctggaatgggaatgaagaggcccaattctctttcctgttacatagacctacatttgcctctgtaactaattcttcattgtaccttacctatctatcttcacccagccaaaagccaaacaggcttaccaacaaatttgctcccaggaccttccagggtcttgtcccaaatctgaggcccagggcttcaccccttcttcacctctcattcacccagatttctcagttctatcttaaaagagctttcacaaaagcctttccctctgcattcccactgccatggcctcggtgcagccacttcttggggctcccctgaaccaacaaaaatgcttctaatctatctccatgcctcaagtcatgcacccgtccaatccattttccctacttctactctacaatgattctaaaaggcaatcctcgttgtatggcactctataaaaacaacaaccagtcctcatctagttgatcctgacttgtgtcagagtagaactgtgctccatagggttttcaatgcctgctttttcagaagtagattgtcagaactttcttctgaagtgcctctgggtggattagaaccaccaaactttcagttatcagctgagcacactaaccatttgtaccacccaaggactggtactctatagaaatacccaatttcttagcacagaatttaggtccctttgtgatcggctcttttcaccctctgcagctttcacgccctacctgtcttcaggtggcaccctacctcctacctctattcaccagcttgctcctgaaactggccagctctctcacatttatcccttgagcttttccccatatggttctttgtccaaaatgtccttccctctctcattttcctgccaagctcctctctatcttttaaaccttgtggaggtttaaatcgagcctaaacctccagtgggttgatctaatccattaggtcaacctccagctcacctctgtgtttctttagcaccttctccttctatcacagcaattacaatctctccttgagactgtttcagacatttcaaattcacatacatgcatacacacagaaagaaaagaccataacacacaatattcaataaaattaaacacacaattgaaaagaccataacacacaatattcaataaaaaaaggctgctgaacagatgaataaataaatccataagtgtctctaagaatgctccttccatttttcctgttagccatttatttgtggatttcccacataccagagtataaaaaaaccaaacccattgccattgagtcaattccaactcataatgaccctataggacagagtagaactgccctgtagatttaccaaggggcagctggtagattcgaactgctgaccttttggttaatggctgagctcttaaccactgtaccaccaagtaaataacttgtttacttatggaaaaaaaaaaaaaaagaaactattctgctaacaccacttgggaaggtgagacgataggaaatacaacctatcatacatagaccaggctactagtctgtaggtggggaaagaagggtatgtgtgcatatgtggaacaaatatctaattactttatttgaaaggagagactgaaaacaggaggctggcagagaggcctgtggtctgatgccttgttctccagccctcagcactagagtatgtgcagaccagcagcacaccaactcttagtgcagttaacactagggctgaccaagcaacgtgtgcacagatttgcacacacagaatgaacagaaaaccaactactacctcccaagagaggtccctgggtggtgcaaatggttaacacactcggctgctaacagaaagtttagaggttctagtccatgcagaggtgtcttaaaacatcagccactgaaaacccaaaggagtacagttgtattctgacacacatggcattaccatgagttggtgttcactcaacagcaactggtttttccctgccaagaacaactgtgacttaaagactcacccaggatctgtaaagcccaaagacacagcagccccttcagttcctccaactgctattttatgacagtcagtttctgaggggttgcggttacctgagcatagaaagacctatgagctatcaaagaataacaggataatgtagaaggattcagtccaaagacatgggcgtgagggctcaattagtcatacctaggaataaacctgatagctcatctgggtagtataaatagtagaaggccagctaaaaattacatttcaaatatataagcagtaaaacatttccttgctagccactctcaggcacagttttacccatctcataatgtcatgatgtctcaggatctaaagtaaactaagtgacacacttgttttgacagatcatgtgtttattcagaagttcattaaagccaggaatatgcacaaaatctgacagtgttcaaagctaaaaatcaaaaaaagaaaacaaacaaacaaataaatatatctaacaaaatgctttggaagatgatgatattagccaacgaggtcaacttctgacattatttacagacaaacagacattactcaacaaaacagcccttgtggaaacctcattgaatccctggtaacttacagcaggaagaaatcttgcaggaaaagcagggacagtgctcacgcagggaacggtgaattgcgtgggcgatacccagggcacctcttgaaaccaagcctggctacttgttaatttccatctgaaaatgtcctgttttgtgaaaatcgcaattctcaccatccttccaggtcagctcctgtctgacatctttcccgaagctctctccaagttgcccagctcacactgctctttttccctggcatcgatatgactaattgtttattcctcttgatttttcatgttatttgcatatagtcaagatggtaggaaatatatatgacaaaatttaggacagtgctaagcatatgtcaaggagccctggtggaagaatggttaagcacttggctgttaaccagaaggttaggggttcgaatccaccagccacttggaggaaggaatatgtagcagcctgcttccttaaagatttacagcctttggaaaccctgtgggtttctatacagtctctgtgagctgtaatctacttgatggctgtgggtttggtttctgggaagcacatatcacctactccaaaaatgcgacctgggctttgtggcccccagtggaaatagaattccatcctccaattacaaagtaaaagtttcagaaaggagcttactccctgttacagcaagttcacactgactaggcctcctgttctcaaagtggggcccccagcccacaggcatcatcatcacctgggaacttgttagaaatgtaaattcttggccctgcccacagctcctgaatcagaaactggaagtgaagcccaaccgtttgtagtttaacaagctctccaagtgattctgatgcagtcaagtttgagaatgactgggtccctgggttgtgcaaacggtttacactgaactactaacctaaatgtttggtggtttaaacccacccagcagtgctgtggaagaaaggcatggcaatctgcttccctaaagattacagccaagaaaaccctatgaagcagttctactctgtaacacatggggtcgccatgaattggaattgactcggcggcaccagatttgtactagatttacaactctcatctattcggaaaaatgtgaccacctgatgagaagaaggaaagatagggcctcttctgatgtaatcaataaagttttataaaaatttgcctatctttgcaaagaactatttcctaaagaaagtaggcacaataagattcgacacctgaaagacaacaatgaaccacccccactcccaaacagggaaatatttttctaacagagcaacgcagattatatttctaattaccgggggaattgcttagcgctgactgtcaggacaactgcaaactcttggattaattcatgttctggactgaatgaatgagcaaagcttattcccatggaaaccaagtgctatacagattgatagggttattgagcatataactgagctaaggcaattgccaattttagaagattagcattgacaatttgacaggacacatttattttccaaatatcagaggtgcctcatctacggtcaaggataaaggactgtcaaaatttgatttaagagaaaagaggaaacctactaccacatagcctatcatctttgagttgtggccaaaatgagggagaagctctgttttcttaaaactcccctaattacaaggagactgttttgaacgttggtattaagccggttgctatggcttcctgcctgagagtgcagtgtgccaagtttcagtcagaagcaagctatgaatggggctgaatgagatgctcacacaaccagggtttcacacccaacaccctagccacagagtaccccattaggaagattacggggagggagcagagtgctaacaatggcccacaccttctcttagctttgcgggccactcatcctgtgccttctcacaaatctctttgtcacataggatactttttctgtataaagaagggctgcttcaaacagcagccgattggtgtctcagtttcctcctgagcacaaaggacaacgtggatctttgtttatatcgccaaacactgtgtttgcttgttccttgggcaatgtcagcgttcggaattttatttatgactgtgaccaaaaggaaagaaggaaaacaagaagttcaaagcagagctaactatgctcagatacaggcttttgtcttttggtaacgaaacaagaaataaccacagtggatgctatctctatgtcctcagagatagaaggaacttcttatgacacaaatcagaatgttgaaaatgctcagtgctggccccagagctgtgctcatgtctaataactcctcagatatctacgaccccttctagtttcaaaatgcttcacctctcagatctcctggcttctcagaggggctaagcctttgaaatttcatgccaggatttagtgatttcgggttttgtcaaaaaaaataaaaagtccataaacaaatgccccaaatttgaggctgtttttttttgtttgtttgtttttgtaaaagctcagcttttgagagctgtgccctatgtttcgaagagcaagtggtactttttgaactttgtattttataaagtaaggtaagagcaacacctttatgatggggacagggagtggtcccagacaagttcaggaattcttttcagggtatttacatttacatacaattaggcagaaggggtgtgagggaaggaatacagggggcagaggtaagggtggagataaaaagaaaggaaaggaaaaatgcagcaaagacattctgtctgagaagaaggaagtgtcttgtattcaactgtgttgacctgaaggtctagagaagggggtggaatttgtactctttctccaagagatggtgacccactcacactctgaaggttgacatgattatctcccaagctttgacggttcattatctgggcttacacagatacaattgttttgtggctccaagaacaacagcagtcctttctggaatctagcagttatgccctggtcagtgaccccttgattcaaggaacttgctggctgacaatatgatttgagttctgccaacgcaaaactgttttctttgcgtggggatcggggaggtctctaggactaactgtgaagttctcggtaatattgcaggttactggattggtcaatggctttatctttttcttcacaactttcacagacgtggtcaaagtcacataaaggttatactgaaggattatgagttatgtttggtttgagacccagaacctaattggtaaaatgagccagcttttagtcactgggatatgagataaaaattttaactgcaaggcttgtttgcagattaaactaatatcacaagaaatgggaatatctaagtctttgtcttaatcatatgtgggttctagaaatgcactgactagatggaatctcttaaacatgtttcccaaaagtcatgcaatgaatccaaggccaagtggacataccttcttgccacctcatcagagggcttacccccatgcccccaaccaaaccagtacagaattcactgccaaagaaaagtggacaaaagctgaagtattcttattttgcagtttccttgattttcagaggtaaagaatgcaccccaacttgtttctaacccaaggctattagttgttaattcaagtgtaatataaatctgaaaagatgtaagccccaccaaacccattgctgtcgagttgattctgccttatagtgaccctacaggacagagtagaactgccccacggaatttccaaggagcacctggtggattcaaactgccaaccttttggttagcagccatacctcttaaccacaacaccaagtttccatataagctctagtcctttagaaaatactcgctcaatacacagtccgcttcaactctgtcaaatcagcgtggctttaccataccttcacccctccgaggttcacagaattgaaatgggtgacaaaactttttgttctaactgacaagattagcgtgctcatcagattggaccccagtttgttgacttgtgtctttctgcagcagaattttgcaaatcagaagaattctgagggacaacttacgtagcaggtctgcaaaccagacatggcaataatttatctcaagtatccaaatgtcagttggaacgatcacatctcaatggggcaaccatgctctcaggaccatccataaacccattattgttgagtttgactcatggaggactcagtacttcagagtacaactacactccataggttttcaatggctgtgatcttaaaagaaatagaatgtcaggcctattggttctcagttgacagggcagctttggggcaaagtgggagtccaaatattaaactaggattacaataggacttaaaaaaaaatctatcttgacatgttagaaaggaatctaagcaaatagctcattctcaggtatccgtataaatcatctaattgtaaattttcctcaggatcatctttttagttaagtttcttatggtagtgagcaattcaagacataggtaacatttcttttcctgtaagatctctcttcccttttcactgatacctgcaattccataattagacattttcccctttatcccttatttaaatgccacagcaggggagggggcctcttatgctttgtcagtcattgtgactccatctccacggctattgtgatggctaaaacttatgtgtcaacttggctaggttgtggtgcccagccgtttggtcaaacactagtctagatgctggcaggaagcagctacatgtgattcaacagttgatcttaagtaaagcacattaccctccataatgtgggtgggcctcatccaatcaggtgaaggccttaagagcaaaaaggagcctccctagggtgtgttcttctgcctctagactagaaatagacattttgccagaaccccctcactcttcactcttcccatcaccccatcaacaggttttgggagataagactgcagaggtcttcagcctgtcacctggcctatagactttaaacttgccagcccttttaaaatcatgtaagccaaccccttaaaccaaatctctatctgtctgtctctatttatctatctgtctatctacccatctacctacctacctacctatctatctggttctgtttctatatctaagatagctatgcagagaactctttgatagctagagccttgttttttctccttctttggtattccctgcagatcctcacccagtgctaggcacttgatactatagaatcattgagctccaaggaactccacagattactgggccctgtcacctgcctgatcaggaaccctggtggcacagtggttaaagcacttagctgctgactaaaagattggcagtctgaacctaccagcagctctgtgagagaaagatgtggcagtctgcttccgaaaggatttatagccttggaaccctatggggcagttctactctgccctatggtgtcactgtgagttggaatcgactcaatggcagtgagtttggtttggtttggtctcctgatcacatagacgaaaagatgaaactgaagtttggaggagaagagagacttgtccagagtaactcagccagtgagtgacagagctcagaccagaagtgtggagtccccagccacttggccagcatttagtgagcccgtggcaacatgggagaaaggcctggcaatctcttccataaagatggctgccattgaaaaccctatggagcacttatgctctgtaacacatggggtcaccatgagtcagaatctactctgcacaatgggtttaggttttttttttttttttaaactgtgtgccagcactgtgccagacactgagaatgcaggcacaatggctacaaatgccttgtcctacagaagctcgtaatctaagtcagttggccagaatccaaccaataattacaacgggtctatccaagagtaaattattaattaacccttgttgaatcagtctatggaagcttagcaattgacctataaaaatgatttctttagaacatgtttccacagacaggttttgaaatgagattctagcaaatttaacttaacctcactaatcaaattttttttttttgcatttggagaacatgactagagaagtcaaacattttcgtcatatgctcagaattagttatgtttattcatttagtcaatttattagccacgtgtgtatacaagggatacagacacagaaatcttgatttgcctagtcctgtagtccagctctaaatctagttaatattaacaatgggtaagctattaactcttctaaaggattaatttgtacattgtcatggatgatagtcaagtgcgaagccttattctatccaattttccatgaattctctcagataattaatttcaagaaacagcaccatgtggcaccttatcattttcccatcccccagggaccatctaaaccatgtgacaagctcactgaccacaaagcttgatggggaagtggcactaacatgagctatttgccaagcacatgcagtctttgctgcatgggagcactgagttccctctatgcttgagcacctgtgaatctcacctgctttttacaactcacatgcttgccactttcatgtcaggcttggatttttcccaatatttcaaaattccataggctgctccgtctgcctctgtttgcacatatcttcatctggcttatacaggcctgctatggatagaattgtatcccccaaaatacatgttgaattcccagctcttgtacctgtggacctgtttggaagaagggtctctcttttgttatattaatgagggtacactagcgtagggtggatcctaaacctaatcacttctgagttataaaaagaccagaatagacaaagagacaggcatagggaaagacagatgccacgtgaggattgtctataaaggactcctgggatgacctaagaagaaggaatcagacatgctcaagacctcaatttggactttaagcctctaaaattgtgagaaaataaatttatgttttttaaagccacccacttgtggtatttgtgttatagcaacactaggaaactaagacaatgccttttcccatatgtgctaaatgtatccaccgttgtaggtgagcagggaatatagttcttgggttgtgatcttctaccgtagtggccctttgctagccctcatctgagcagacatcagtgggccacttcttccgtcttcactctggaccaccacataaacgctggctgatttctgaggggctcagagagtagaaggacgctgtatcccttcatcagaaggaagctctgtgtgggtatgtttatcatctgatcatttttcttctctctcctcttcccttgactcaagagtcactgcctatccctagagtcatcctagtctcaaggttgactcagtcttctactcttttctttttatgtcatttgtctacattagagtcttgctattcattaaaggtcaaggcaggaaagtctcctggactagctcgttacagtccgtgcccactgtgacttccctcttggcggctccccacagaagcactcaccagaactcagaagaagcactggagaaatgcacagaaaaaaaaaatatgtatattttttaagaatagtaatatttttaaaagattttaaatattggcacatacagtgttctacaatactttgataaatgaataaacaaatggtaagtttctaagcatgcccaaggaatgaagagggcacattaaacagaggccccccaagttgaggtggggtcttgagtggcacctccttttccttgctgtctctaatgacaggcatctgaaatgatgttagatcacacccagataggtgagccttcttcctgggcgtcggagatgggagagaagcacctcagctctcagggatgagccacctctggttatttagtcaagaatacatgaatcattcacagtacttgctagaatgagcctttacctagttgctataaaaaaaaaaaaaaaatagggacgcctaaaaggaacaaaaccactccagcaataacactgtttttacatgattttggtgactgctaccattcattcagaaatccctcgatggagcaaatagttaatgtacttgaccactaaccacaaggttggaggtctgagtccacccagaggcacctcagaagaaaagcctggcaatctacttctgaaaaaccagccactgaaaaccctagggaccacagttctattctgacacacttggggtcaccatgagttggagtgaatttgatggcaactgggtgatggtggaccattcattccttctttcgcccattcagtccttcatggaacatcactgaatgctcccttgcaccaggctcgggggatcccgctgctctcacacgccagctctcgcgttattacagctctccttgtcactggaaggtggctttcaactttctcaaatgatttttttttttttaattcctgtgtcacttggtccttacataaactcagaagaaaaaaggggcccagaaaaggttaaagaatttgaggagaggagggcacacgtgaggaaagagcagagtttggttcaattttatgatgctttgagccgtgcgtagtttctattagtctgtttcgttttcttttcaaaaggagcaactgtttctagatgtcctgcaacagcggtgtgtacaacagggcagttccctgtagctggagccaccttggacaaaggactttgaacacaaactgtgtgatttgcatcactgagttttcactaataactactgctcttcattttccagtttcccattggaatctggcaactacacaggaaaagggatttgctatcatcctgctcctatcagactaagattcatcctagttaattcctcgttgaaaaaaagtatttctgttatttccagacaatatttaattaattaatatttaattaaggagttgatccttaattgagtattacaaatagtacagagcatagagaaaccaagacgcaggcttagggtcagagttggttctggttcttaagcttagtaccaacccttactaacatatgttgctttgggcaagttatttaatattttctgatcctcagtgtccatatctataaaaggagctttacagggttgtttgaggaattatgtgaatgcacacttcatgagagaaggacatcgtacatcttattcacccacagaatcctgtaaagaatagagcatgtctcagtcatctagtgctgctataacaaaaataccccaagtggatggctttaacaaagagaagtttatttcctcacagtaaagtaggccaaaagtccaaattctaggcgtcagctccaggggaatgctttctttctctgtcggctcaggaggaaggtccttgtcctcaatcttcccatggctgaggagcttctcaggcacaggggctccaggtccaaaggacgtactctgctcctggtgctgctttcttggtggtatgaggtccccctgtctctctgcttgtttctatcttttatatctcaagagattgcctcaaaacacaattcaatcctgtaggctgagtcctgcctcactaacacaactgctgcccatcctccctcattaacatcatagaagcaagatttacaacatataggaaaatcacacactgggaatcatggcccagcccaattgatacacacattttggggggacatgttttaatccacgacagagcacaacgaatatttgttgaataagggattaaataaagtacttggaatggacctacacagtattcagtatatcactgatggccaagaatcaacatctaagttaatttccctcttttcctagggagttgggctccatggtatatgtaaaaataaatggttatggaaccctcatccactgctggtgggaatgcaaaatggtagagcctctgtggaaaatggtttgctggttcctcaaaaagttgaacatagaactaccatatgacccagcaatcccaatctaggtctatactcagaagtgaaggcaggaaagcaaacagaaacgtgtacaccaatgttcactgcagtacttttcaaacaagcccaaagctggaaacaaccaaagtgtccatcaacagatgaatggatagacaaaatgtggtacatacatacaatggcatactactcagccttaaagtgaaatcaagtcctgatgcatgccacaacatggatgaaccttgaaaacactatgctgagcgaaataagccagttgcaaaaggacagatactgtatgatctcacttgtatgaaataagcaaatatagagaaaccaaagattattaattgttgccagaggggagggtgagggaaaaggggagtttttgtttaggaagcactgagtttgttaatagtcgtagggtattttggaaaaggatattgataacagtggcacaatatggaaaatgtaatcaatgtcattgaattgtaaaggtgaaagttactgttttggtgtgtatatttttaccacaataaaaaataaataaagaaatgtgattgagtccagtagaactagatggtacccagctaccacctatgactgctctgacagaggtcataatagagggtcctggacagagctggagaaaaatgtagaacaaaattataactcagaaagaaagactagacttgctggcctgacagagactggagaaaccctgagagtatggcccccgaacaccctttcagctcagtaacgaagtcactcctgaggttcacccttcagccaaagattagacaggcccataaaacaaaatgagaccaaaggggcacaacagcccgggagcaaggactagaaggcaggaggggacaggaaagctggtaatagggaacccaaagttgagaagggagagtgttgacatgccatgggttgttaaccaatgtcataaaacaatatgtgtactaactatttaatgagaaactaatttgttctgtaaaccttcatctaaagtacaattaaaaaaaacaataccaaaaaaaaaaaaaaaaagatgtaatttgcaataagggaagaactcttatagtcctacaatgccagaagattccatcgcagagcgtgggactgttatgaagatgtttgggttggtctggattaactgcgggataccacccgtcctccgtcgaaaagctcgctgtcagtcagccccactggagctgtcaagagtgaaggaaggaagaaagatgctgccagcaaggagcccaggcccggaactctgggtttgacttcccactcctgagtgaaaactccgtctgtgtacaatgacaggctctctggtccctgtaaggctcctggggaagcgcttaagcccaaaatatcatgtgacctgttttctaaaaaaaaattctactgcagaaaaaaataaagtctgatgttggaggtttagttccatgggaaactactactacaaattaaatttttaaaaattaaatccaatattaaaatgtattaaaggctctttaaagaaatctttttgtgaatcttttgttatatgaagaatttttctggaaagaagaaaaatcaacccctgatgtctgttttgggtgaatctggattctcataaatagaactttcctatagtgcagtgtgagggcttcctcagtggcaaagggttcgagcctgcacatcttcccagtggtactcctcaaagaagctttctccagacctccctcagaacccccttccgacctctcatatcagggaaggctcctacacacaaaggaagtccgaatgacatttgtgttaaaacagactgagtccagcacaactagatggtgcttggctaccgccaacaactactctgacagagatcataatagagagttccagacagagctggagaaaaatgtagaacaaaatcaaactcacaaaaaaggaccagacttgctggtctgacagagactagaaaaacactgagagtatggcccctggacacccttttaactcagtactaaagtcactcctgaggttcacccttgagccaaagattacacaggcccataaaacaaacaatgttgcacgcaactcaaccatgtatacgagactaaatgggtacaccagcccagggcaaggatgagaaggcaggaggggacaggaaagctggacaaatggaaatggggaactcgaggttgagaaggggaaagagttgacacaacatggggttgacaaccaaggtcacaaaacaatatgtgtattaattgtttaatgagaaactaatttgctctgtaaaccttcatctaaagtacaattaaaaaaaaaaaaaaaaaaggataagtaaacaaacaaaaaaccagagagggaacttctttgagaggagccactgtaaaatggccactgaagctatggcactgaaccttacagaaggtcacatcctgggagtagccaatgatcaaagtgcagaaaggtgtacccccttcaactttgaaatgtgctcaagatacatttagacagtgcagttattagcatcatgagttttggggtaagacaaatcttggtgttcactagtcatgtgaccttaaattatttttggagccccaatttcttcatcaataaaatggggatatttatagtgactctctatagaattgtcatgaaaattaaataagattattaatatacataaagtattaaagtttagtacccaaggcatagtaagtattttgtaatgtcagttgatattcttagtattaatattgttgttatcattacattttgtatgggaacaggaagccatacggaatagtttaaggtcatcagatcatttgataacaccatcttcattatttcatattaatttatcacatattgagaggaatgtataattggtcctccttcttctatcccagaattcagtgttcctatacgtctgggctattccatcctgaatcaactattggatattggcctctttctatcgatcagaacacacctgttctgtgcctcattctctcaaagccctttgtcaactgcatgacaactggataagctgattccaatttccagctctttctggtgacacaagacagctcagttcagcacttaaaaactggctttaattctagcatttcagtaccactcaactctcacctctgtagcaacataccgagcaaaggtttaagtcctaattagaagcaagccataaatattgtacgaggacctggtgtttctgcctggcttaagttatagcgacttccaatcatgcattttattttttggcatgcagacataggtgcccaataaacgttacctctggtgataataaaacaaaagccaaaccttcaaaagcgaaatatccaaaagactattgtctgcattcttggcagcaactagagagccagttttcccaagtcagcaggctctgagtaggctggctaggggccaattcccaggattggtgcattcctggggcctggcaagaggccactgggaccttgtttcctcttcccttctctttatgtagtggaaaatctatcccacttcaacccctctgagtctttcccccctgttggagtaaagggagggagtctggtgggaaatgttcccccagccccttccccaaaactcatctcccactgctcttgagttggcatagctcggagcaatcgaaggcataagacaaacaaaggagggtgactgctgcccagccctccagcctgattccatcaggggctcaggacatggagcagggagacctggcagaaccttgtgcacaggagtcattgtgtgtgtgctgggaagactatgggcacttctggaagtctttggaataaaactgcctgttacaaatagacattggctgggcttcagcatgaaagcagcaggccaaaatttcctgaagaaaatataatgctccatataagaaggtctggtgtatagcttgttaatatggggctactgagcaattggatggaaaagaaagaaatctatggttttgtcagaaataatttgttattaacacttgaatgaatattcctggctgatagtctgataacattacaaatatgccattcagtttttaaaagcatatatatatatgaatatgtgtatcacaaatagtttttaaaaagtcttttctgaatgtctccttccatatgtagacaaataaaactgccatctggagccaccatgtcagccactgcatgttttcaatgtagaaaagactgcatgctaagctctatgctatgtatttttctttgagctctttcacttcattctcccaacaactctttgagtaagacattatcacctctatacataggtaagaacatggaggctcaggataggtttaagtaccatgttgcagttatgttaattctgactcatagtgaccctatagccaaggtcatataggcaatatttggcaggttgggattctaacccagtttggctgattcttcctctagcccatcctctttccactacatttcaaagccttcatttccactacaccctttgaagtaagtactttgtacacagtagagagacagatagacagacagacaaacagaaagacattgagttggttctgatttgattcacggtgtacaacacaacagaatgaaacattgcctggtcctgcttcatcctcatgaggtcaccaatatgcctaagttcgtcattgtggatactgtgccaatccgtctcacctagggtctcttgttcccctgttggccctctgcatcaccaaacatgatgtcctcttcctgtgactgataaagtgtccaagacaagcgagttggacaatgttctgtgtgatccataaagttttcattggctaattttcagaagtagattgccaggcctttcttcctagtctgtcagtctagaagctccactgaattctctctaccatgggtgaccccactagtatttaaaatgccattggtatagctttcaacatcatagcagcaagcaagccaccacaaaacagcaaactgacagatcgatggtggttgtacacagtggagttctacagtttccagagtacctttcttggtctttattttacttaatcctcatggcaactccaacatgtatccattgaggacacagaaattaagggaatttaagtaacttgctaaaaaagcacatttaatgtagtgatcaatcactgttacaatctatgtaccccaaccattacacgacattcacacagtcatgcagtaggcatttttattgggacccctgaagagaagaccatgtcactggccacatggaacttgtgctaaaggtgtcatatcatattgatctgctcaaaccaagtcagtgagtccaagggaatgggctaggaaacaatacactgaaacccatttctagtgacacattaaaaatggatagtctaaggatagtgtttgctcagcacagaaatgtgaggccagagaggctgaggtggagtagatactattatataggacaaatgtgctggatacatcccatttgtctctccaaatccactctctacccttctttccacgttgctttgtgccccagggtgctccacggggccgctttctctctggttcacccaatcggaagcaccaggagactggagagggtaaggagagtgaggtgggagtgtttatgtcctgatgccctgtatgctgggtcaatgctgattggctgcatcccgccactgcaggtgacactttatgccaggtgaccctctccttactcctttccttaccctttcctgcctagcagtagtaatgactgcccaccatgtctaccttcagggccctgtgccacccttgtgtaaagagtgtattaaactcctctcctttacctagcttgagtgtagcatgatatttgtttccttccaggacctcaattaatacactaaacaaaaaaaaaaagaaattgttgtccacactgtttgtaggcaaaactatggatcatcagaaaacctggtggcatagtggttaagagccatagcacttaaccaagaggtcagcagttcgaatccgccaggtgctccttgggaactctacggggcagttctactctgtcctatagggtcgctatgagtcggaatcgactcgacggccgtgggtttggttttgtttttttaagaggatgagacctcccccgcctgtcagtttgttgtactgcagtggcttttgtgttgctttgacactggaagctatgccgctgatatttcaaatattaccagggtcatccatggtggataggtttcagtggagcttccagactaacataggctacacagaaaggcttagtgatctacttctgaaaattagccaacaaaaatgttacagatcgcaagagaatattatctaatatagtgctagaagttgagcccccttgcttggaaggcactcaaaatgtacagtggccatcacaatggattcaaacaagacaaagatctgttgtacataaagttgccatgagtcagagcctaccagacagcaactaacaacaagaggatgagaaatgttaaccacttgggacctggctctctctctctcacttcctccttactagacttcatcaaactggaattaagtcagagattcagcctcagggacttaccagcagagctcgaaacttggcccaggagatctccaaacagctacctatcacagcagtccaatctaggattccacttggaaaggagggaacaacagtagagccttacaccagtcatatctagttggtagcttcaagggctcactgccaacaccaggaccacctatgttggcttactgccagcgcacagtcacatcatttccagggatggcagacttctgactatagctcttcctctcaaaaggcaacggcccctgagcctccttatctgccacctttgtcagatggatcccagaatttaccagatcaaatgattttcttttcctcaacacatctatgaacatgaaagcagtcaatgaattaactgtattagggaacctatcaagctgaaggcaactgcttaaaactaagaaccaaggaggtgctgaaagacagaagggaagcagatctcagaggcatctttggaaatgaacaattatgatccagtaagcctagttaagagctggaatttatgaagatgaaacatctggaaatgactggaatgtaaagggaccagaagaaaccactgtttgagcttgcagaggccaacccagacaaatgggattccatgttagaaaagaattgcaaaatcagtacatgaaagggacagaatagaagcagtgcacatagtgttaagtgaagcattttaaaacaatagctcctggatttgctcttgaaatattaattgaaatgagatggagatgatggctgttacatgaacagaaaactggcaggaagataatacacaatgcctaagctgagccaaggcaatggaacatgacaaagcaacataaactaatgagaaacgctgcctaattcatggccgtgcaccctgtggatgcttaataaatattaattgataataatgaactagagtgcagggtgataaattagagcaagacaggctgctgaaaaataactaatatatatacagttggcacaacatacactgataaatgaacgagaagaaaggaaatcaaaatgattttgctgggtgatgcactttgccttgtaccaggaagtatgggtaagaggacattaattcaagagtgaagagggtgtgactagaggggacaaggggaaacttaagatgacaattcaggattacgatactgctttcctagagtctcagcaattccttaagcataagccaggcaccttggagtcataccccattcttttaagacacagtggtatttctcaataaacttctgcttcggggaactgagggacattgtagattaaatttggagctgtttgctagtcaatagtactgacggtgagaaaccttgctctagagtagacagacatgtgacaatgtggtcaggacagtgataaagacctgaggtggggatgacggcagctcaggaaaggacgttttaataagaactctggttactatggttgtttgcataataaaagcccacctcctgcgggaagccttcactggttgatacagccagaagaaagaacaacctcctctttctaaaccacatcactcttagtgtttgcatcactgtctatctattggtattactatgatttttgtatatgtgattactatgatttttgtatacgtgattagatctttcaaagtttcgtacagttgacactatgctttgcatttctattttctttttacttattattcttaaaaatataggtgaccattagagaaatgcaaattaaaactacgatgagattccatctcacaccagcaaggctggcattaaaaaaaaaaaaaaaatataggcgaaagtttacacagcaaattagattcccattcaacaattcatacacagatagttctgtgacattggttacaggtcctgcaatgtgtctgtactctcaccatttccaccctgcctgctgtttgcaaccatccagcttccctgcccctccttgccttttcatctttgcttttgggtaaatgttgactatttgttctcctataattgattgtttaaaggagcacattccttataggtgttactgtttatttataggcccatctattatttggctgaaaggtgaccttcaggagtggcttcagttccaagttaaaggagtatcttaggatgataggccagtaagtcctttttttttttttaaagaattgatttttattctacatttttctccctttctaaccaggtccttctattgtgtccctggtcagaacagggtagcgttagccgggcgctatctagttcttctggcctcaggcgagaagaggctgtggttcgagacggtcattagtcctttggactaatttctttcttgcgtctccggtttctttcaccctcctttgctcaagatgggacgacgccaatagttgtgtcttagatggttgcccacaagcttttaagactccagacactctcaccaaaccgggatgtacaacattatctttatgaagtaagttatgccaattgccctagttgtcccatgagactatggtcctgagccttcaaacccagtaaattgatcgcatgaggtgcttggatatgtctaggaagcatccataactgtgtcctctatgtgctttactgtacagatgaatatatatgcagcatacacaaacatgtatatacatgtccacaaagatacctatatatgtacatgcatgtactcccatacaccttcctacacctatatagtacatatatctatctatgtaatcgcttacatattttttgtttgttgttaccgttgttacaaacttgtatgttataacatttactttaactgacctttattcttgcatacctctcagtatctttatttaccttggtcaagttgtactgacttcctccatattgcctttcctatcaccagaattaacacatgtctactatcggaattgacttgacagcaatgggtactctctagtaagtgattcccccctccctccccttcccacccctggtaaccatcaaagaatattgctttctgtgtgtatacctattcttgacttttataaagttggtatcatgcaatatttatccttttgtgattgacttattttgcttagcataatgtcctccagatacatccatgttatgttttatggactcatcattattcttttttgttgcataatattccattgtatgtaggtaccacaatttgcttatccattcatccattgatgggcacttaggtgatttctatctttttgctattgtgaataacgctgcaatgaacgtgtgtgcgtatgtctattcttgtcattgctcttatatctctagggtatatacctagaagtgtgattgctggattacaaggtatttttatttctagctttttgagaagtcccatatcgttttccatagtggttgtatcaaatttgcaatcccactagcagtgcatcagagttccaatgtccctacaacctctccagcatttgttgtttcctgtttttttttttttttttgatcagtgccatttttgcaggggtgagatagtatgtcactgtagttttgattagcatctttctaacacctaatgatcatgctgtgagcatctcttcatgtgtttgttagttacctgaatgtcctctttggtgaagtgtctgttcatgtcctttgcccatttaaaaaaaaatgtttttattgtactttagatgaaggcttacagaacaaagtagtttctcattaaatagttagtacacatattgttttatgacattggttaacaaccccatggcatgtcaacactctcccttctcaactttgggttcccagctttcctgtcccctcctgccttctagtccttgctcctgggctgatgtgcccctttggtctcattctgttttatgggcctgtctaatctttggctgaagggtgaacctcaggagtgacttcgttactgagctgaaagggtgtccaggcaccatactatcagggtttctatagtctttgccaggacaataagcctgatctttctttttgagttaaaattttgttctatatttttctccagctctgtccaggaccctctattgtgatccctgtcagatttaacccatttttttttttcttggattgtttatatattttgattagacccttgtcagatatgttgttaccaaaatatatattttcccagcctgtaggttctctttctactcttttggtaaattcttttgacgagtataagtgtttaatttttagaaggtaccagttatctaatttaacttctgttgttcgtgtgtttttatgtttttgatagtgtatttatgccaacaattaggacccctagttttgtccctatgttatcttccagatactttatagttttagctttaacatttaggtctttgatctatttttgagtcagtttttgcatacgatgtgaggtatggatcctgtttcattttctgcaaatgggtatctgctctgcatttctcagcactcgcttcacagtgcttcaaacctagtaggcacagttcctgtgctgattagttataaccttggggaagaaaacaggcacttagaacacccagctgtctgctgggtttgaggaccagcgtcgaagaagatagatgaaagctctccctcttgttatgtacaaagtattagagagtctgccacaggaacaatctttggttgcaagaggatgatacagaaaactcagttgccatggaaacttgtatgatctgaagattcccatcactgcaggatggcaagacaccaggagaatgataaacaggtttcagagcgctaaaaatcacagcacatgccatgcacacatctcggctcctttgtactaaagaagcagtgtcacgtcatcactaccaataacagcatttgccaagggctttcaaaatgtatccagttcccgttttaatttagttatctctgagaccccaactattcacagaactatgtcagacacaggcagacagcactcactgcagctcagacaggtgatggagccaggtgctacctgagctcctgctctgtgatcctgggcaagggaagcaatccatgcccaggtgatatggccagggcttgcttgggtcccagacacttttgagaatctgattatatctatagattcactccccagaaaaatgcacacaggcacatgcatacaaaatctaatacacatatttcagaaaactcaaaccccttgaagtcttttcataaatttcccctatcaagcaccttagaactcgagggatccataataccacattaggaatctctaatgtaaaacaaaaaatgttagtttagactaggatcatccttgggcaaaactaaggagtggcgttccatctaccatctctaactttgtccttcaagttcttagttcctttccaggtagttcctcttaccccatatatcatgaaaagtgacttgttggtatgtttattcatttagctcattgaatgttccctatgtgctagccattagggagacaaatgtgaatatgatatggcccatgttctcaaagacttcatagttcagtttagttaggggtatttggcccccaggggatatctgctcatgtctggagactattttgtttgtcacaactgggaaagagttctattggcatctagtgggcagagtccagggatgctgctaaacattctagaatacaaggaacagttactgccccccagcaaggaattatcaggtccaacatgtcaacagtactgacgttgagaaatcttactctggggtagacagacatataacaatgtggtcagagcagtgataaagacctgaagtggggatgatggcaattcatgaaagggtgttttaataagaactccagaagatgtggctaccacagccatctgccttatcttcaatgacaaaaagacaaagagaaggaaagagtcattcagggtgagtgataacaacaactgagcacagatcctcctcaggcaacatcagaggaagcagcaacaactacaagtggtgggcaggcaagtggcatttctttgggaatctcttcattaagaattttttgggctttcttcccacctccatcagtcagtggcccagccaaaataatgaccagccaattaagccatcactcaagttataaaccttgttgcataccaagagataggtgtactgtggatgtgccctgtcaattaccagtccctctccactctactcccattttagtcaataatctctcctgtatacaccacagtctgtcatctatcatgtgaacaacaatataaaattatatatatatatatatatatgtatatgctgttcaaactgctgaccttttggttagcaactgtactacttaaccattatgccaccagggtttccattacgaactttaatctctactgaagctaggtccaaaaaactgttgctgtcgagttgattctgactcatagcaaccctataggacagagtagaatgcctcatagtgtttccaaggagtggctgatggatttgaactgctgaccttctggttagcagctgagctcttagccattacaccaccagagctctgaagttaggtccaaaacctggttaatcacaaaggcacaaaaccaaaagtaatcctggaactaagttccaacacccacattccttactttttttataaccctgcctaccccccacccctttgacaattgtttgcagaaaccagacccagtctttctcatcagttggcacacacctggtagatatgctaatatacatgcaagtctctaaccttgttgaggctgggcctctttaaggtggaaagctccatgcgagaagctgccagtcactaacataaagggctcctgcttcacagctgctagctgtgcggaggcagtttagtctggagatagccagatttgaattgaaatcccacctctataacttatcagttctacagctttggcaaggtcgataaactcattaagcttcagatttctcatttgtaagatagggattgagttcctaccttaaaggattgtcataagcatcaaatgacagtttccatatcaagcttcgagcagagtgcttggcacatattaagcctcaataaatttcagctcctgttattaaggacaggaagccattctggtctagactcaaccataattcgctgactgaacatgctgagctgtaggctgaagtggcattgatgttaggctctgccagctgtttgcccattgcttggacatattctacttgtcactggcccatctgtctgctcctccagtgtgccctccactcagactctgtccttagcaccagccttgctgaaaatctctagccttgcttttagagttctgttcttattggcttccgatctcttcctgctcttcagtaaaaacccctgttattgttgttagctgttgtggaattggccctcgactcatggtgaccccatgcacgatggaatgaaaggctgcccagtcctgcaccatccccatggttagttgcagattggactgctgagatctgtagattcattggatgatttctgaaagtagagcaccagatttttcttcctagtctgtcttagtctggaagctccactgaaacctgttcagcatcacagtaacacacaagccacctatccactgacagataggtggtggtcacacatgaggtgcattggccaaaaattgaacctgagtctcccggatggaaggtgaagatactaccactgaatcaccaatgctctctcaagacccctagccaccagctattctggaatgtaaccacctggccaaggctcccctgacttttcccagcccatctgccccaaaatccatccttggcatccaaggatttgcatagcttgagggagggtaaaagccccgttgccgtcggtaggcaggacatcttgccaatgtttccttgaccttccatgatggtatcagctaggctggtgggcagattcactgagtaaatagtcacctaagcatctaacacttcatcaactccactattcctcactccaaaggggatatgatcaaagctttggcataacgctttgtaaagatttccagtccaggtcaaacctatttcctaaaaatggcctcggctggatcctcagacattcccatatcttcccacacctggttccaattcatgttctctattcttttcagtacatttaggagatggctgagataataatccaggcaaggagaatgaaagagttgggggaatgaaaagaatatactttgtatactcttccatcagtagggaatccatggatagtgcaaatgactaactggcttgactgctaactgaaaggttgaagattcgagttcacccagaggcatctcagaagacagacctggtgatctacctctgaaaaaccagtcactgaaaatccaatgaagcacagttctactcggacacgactggggtctccatgagcttgagtctactagtcttccatcattagaagtgctcaagggtatctgggatttgagtagctagaaaccttctagaacaacctggtattttgtgtactatacagcatccctataatgaggtatggtctaattgtagccccgtgagaataaaaaaaaaaaagtgacaggcgtggctttagcataacagaaattggagttttttttttcttggtattcactgtccactggctgcactgagcaacactaacaatgcttattttggggattaaaaaaaaaagtcctagttagttttgagctctctaaaatattcccctgttgtccaacttcttaccacatgggcatatgcgcttttgcataacagcgaaaatctgctccttcgcctgccttggaatattgcacaccctgagagtaaacacaagtcgctactgagaaaatcagagcccaggaaaggtgaatctgtcttttccaattccccatttctcttactcgtgcacatatcctttttagagtctggactgctgcctccgttgtaaataaaattttgttagaacatagctacatctacctaatcatatactgtctatgacttccttgtgctaataagcagaattgagtagttataagagactggtctgcaaatcctaaaatatttactatctggctctttacagaaaaatgtttgctgacctgctgctttaaaattacttgtagtaactaaatgggagaaaaataactgaagctacaacaacagagatttaaatgaaatataaggaagaattttccctaggagaaagtaatttaatcaatgaaacgatttgtaagcagaaggtttaggacaacatccttgggcatcctggcctctttctcctctactagcccagtcctcaccttccgcattttctccattgcttcaaagcacaagtctaatcacacctcttccgcggcccctcctcgtgtccccccacaataatctcaactcctgttaccgtcaatgccacacagcttgtctcccctatattatgctcttttccctgcttcctcaaataaactctaaacactttgaggatgtgtatttcactgtatccctgcagtaaagagatgaaacactcaaaaccatttatttgaggggagtttgatgaaggactatttactgagtttgggcagctagggcaaaccaaccagggatgggtgggcaacatctacgagccattaggaccaagagactggatgggccatgggagagagaatgtacaggaacacagagatctgccctaataactgtagctagagctgtgggagatggctacttaataaaagctgtaaccttagacagaagatcttcagtcactggagcccaacaccaggcagggaaagagtaggacaataaatacttcggccattctcttctcctgatatctgatcgcctgctgggttcctcccactggccaaacccaaccagatgccagaagataagatgtaccatataaaacttccaacaaggtttatatggtacagccttcaaaggcacacagatggatagggcaggataaagagcagatctagaaggggaaatggcaactacccagcacattcccatagctactgaaatgttttaaatctaaagcaggctttcaacaatacttgttgatggatttagttaatgcatgctggtggattgtctaattactataatgatttggatgcaaatcaccaatgggctgaaggatgaattgaatgacctgtgtgggtcctttcctgcccatatgagtctatcataacggcactgtgtcagaggttaagacctagattcaccaaagttttatcttcttttcatggaggagaaaggaaaggggttaccgagaagaaattcatcattcataagagaaactattactaccatttgagctgaaaagcaaaaggtttttttttttttttttttccaaattaaaagaaaatgtttgctcttgaaatatgagctggtaaaaaagacaaccgactccccagtctcctcagcagctaaatgctatcacggctactgacgtcaaatagctggacgtgcagactgggaatgattcttgtaaataacagcacagtgtgaaacgctgactttttctgatcaaaaagcatcctggggatggttgaacagttttgggtcaagaagaggccctgatttctggggtgatttttatttatcatcagagagaagactgtacttggtgggaatatacggctacccaacacactcttactagtggcgggaaacttgcagtggcttgtctttctctccaggtctttaccccccacatggaaacattatttttcatttcagtttcacttacctgtcactttcttcttaagaaggatgatttatacagcaacatatcatcaacatcaaagaatgcttcagcgttacatgcaaacacacacacacacacacacactccacatgtactcaagccttccccatcccatctcctggaagcaaaattgtgactaaggaccacaaacccaaaatcccaaattgaagcccccccacctccagtatttaaactgcaagcttctttattctgaggttcctccagcctaaaaatttaaaagcctttggaggtagctataatttctactcaacacttcatgatttgattatgtagagtaaaaagtgtaatgaagttaatagtaccttattcttgcagtactttatgaggaattcctactgtaaaatctgaacgtggaaattacctctgggccttctaaccgtcaaaatatgggtcctcatgattattgcaaaggaatttcaagacttaagggttcaattatgtttctctttcctcagttttagaaaagacatcttctcttactgggatattatgtaataaaagatatagagctgaactgacaggtaggaaacctgttctacattggtcagaatactagctgtgacctcagagaaggcatttaatctgcatgaaccttaactaccccctttgcaaagtaaggggactggataacttgtccctaccttagcattctatgatgcaaaaaataagataaaataaaatacatacaccttgagagtgaagagtatgtaatctgatgccatatatatatatatttagtagttcagaacaactcttgcctagaatcatccccatgtgatctgtgccttgttacttgcacggtttaagcatggtgtcaaagaggagtgcaatgtcttgggtccaagtcctttaaaggtcagttagctttgatctcatccacggtctaccacttcctggcagccacaaaagaactcatcaagggggtttcaatggatcccactcccgaaaaacaacacaccatgaatacccttgctgtcattgtcccatcaccatcttcttatgcaaaggagagaacagaatactaaaactgagggcaacattatagtcactcagtctaggtgatataatacatattgtttaacagcattcaggaattcttctgtggtgtaaactgtcaatgtacttggctgcgaaccaaacgttggtggtttgagtccacacagtagcaccttggaagaaaagcctgataatctactcccaaaaaatcggccactgaagatcctatggagctcagttctactctgacacacatggagttgccgtgagtcagggtccactcaacagcaactggtgtggtaatggcatataagcaccgccatacactaggctatacaggcatatgagacgatattctttttctgaatttcctaatctgggcgtgtagatgtaatgcttaatctggaattaggaaggcatttcactaatataaaaaatgtcttaagcatgatatagggagatttaacctgtttctcaggtgacaccaagcaaaagtttccattttcacagtgttcttctatgctaggaaaacaagaaatagatctgcaatcccctcaatctcagggtagagttatatggtgatgaaaatgcaagcttgatttgggctttcaatcagtactggtgacatgacccattaccaaaccaaatccattgctgttgatataaactcatagcgaccctataggacagagtagaactgcctcacagggtttccaaggaacagctggagggtttgaattactgaccttatcattagcagctgagctctcaaccactgtaccaccagggcatatgacaggatttgatttatccccatattcaaagctgtccctaggcaaatgtaaatgtgggaaaagatttcattcagcctgtctcctctttgattttcaggtgcccagttcccgcacataactcctttcctcctttgccctagtcctgccttcccagcgctccatgtccagtgttcttctgtttaccagttccctcaacaaaattctactcatctggttgacatttgggaatgatccaaagacttttgtacatgagtgctactatgaattattgaaagaccacagcttagtatgtttgcctttatggggcatttgcatattatctgggatctaaggcagaatttaggattttaattagaaaagatggtattgggcatctctgtcccctgcctaggcataaagcagattatgttgatatgtaagaaatatttctcttctgcaataacacagaaaagataaaaaggaagttgtcttagttatctagtgctgctataacagagataccataagtggatggctttcacaaaaagaaatttattctttcatagtttaggaggctagaagtccagatttatctgttctggggaaaggcccttgtcatcaatattccctggtctaggagcttctcagggcagggaccctgggtccaaatgacatgctcacttctggcatttctttcttggtggtatgaggtcccgttcctctctgctcaactctgttttatacctcaaaagagattgactcaagacacaacctaatctggtagattgcatcctgccacattaacatgactgcctctaattctgcctcatcagtatcacaaaggtcaggatttataacatgtagaataatcacatcagatcacaaaacggtggataaccacacaatactgggaatcatggtctagccaagttgacacatattttggggggacacaattcaatccataacagaagtactgagaaattaccttcttatcccaagtttccccagaagttgaaaggaaaatacacacacaaaaacaagtttcaccacattataaatggggccctggtaatacaatggttaagagctcagctgttaaccaaaaggtcagcagttcaaatccaccagctgcatcttggaaacgctatgaggcagttttattctgtcctatagggtcgctatgagtcagaatcgacttgacagcaacaagttttttttttttttttttaaatataccgggagatattaagacataggagacaagacaaggccacaccgcattgggagaagaacttaaaatacaaatgcgagtaccaatgttcattacagcactattcacagtagccaaaaggtggaaacagtctaaatggccatcaacagatgaatggataaataaaatgtggtatatccatacaatggaatattattttagcttaaagagaaattaagttctgatacatgctatgccatggataaacctcaaaaacattttactgagtacaatagtcagacacaaaaggacaaatattatatgatctcacttctatgaaatatccagaataggcaaatgcatagagacctaagtgtattagtggttacctggggccggtgggagggaaaatagggaatggaggtgttagccgcttcagcagcacagagtttttgttaaaggtgatgaaaaaaaatggaaacatagcagcgacggttatgtagttaacgacaccgaatcgtgcatggaacatggttgaattttttttttttttaaatcacaattaaaagaaaaaaacttagagaaaaaaacaatacgaccaaagtcattagcctctgaaagtctgctgctcaatacacagtccatactggcgagaagttgactaatagcaagagaacttgatacacaagcttaatgcagttcttttctcagtgcccacaaactcacacctaggaaccgtttgtgggtggacacctcagcatctagaggataagtagctactctgcacattgactgagcaagaccaacagctgcagagtttgaaaggtgtaactgatagagcagttcatattttatcgtatcccaattacgagcctgactttgggccaggtgctgggagcacacaaatgaataaagctcaactctagacagcatgcaaaagaagtaagccagctaaacttctatttcagcagatgagcaggggagaaaggggtgatttccttgatttgatttcttgttctcttcacaggcattacaggatagaagaggtaccttgcacatctcagctcagagaccacgagtgagtggtcaaccttcagaaatcggtggcttagtctgttttcttgaactaaccagattctcatacccaaaagcaaaccaatcaggtttttaagatgattttcactggcactgaaacttttagaaaagagagtttatggatatgtgaactaatttacacacgtaacaagattgaggaggcattctttactcttctgtatttaaagctatattgaactctggttcaacttaccccaggtttaagacaaatgggtggtggaacaattatatataggtttgacatttggcatcaggtatacagtagtgttttgtataggctaaaatctacttcacccagaattaatgtaattatgtataatgttgacagattatgacatttgcctatgaagacactatacaaacgttccaataatttgctggcttttgagtttgcaaaaaataaatgaaataaaatccgagcggatattgctaatggggtaactggaatagaagttccaaaagcatggggttcaggaaataacacagaattacgtcttttaagccaaaacatatagagtggtaaatgaatatttagtacttaccacgagactgctgtctagagacaacctttttccaaagtctcttttctcgagctgtctctttctctccat

SEQ ID NO: 8 - DNA, 5368 bp, synthetic construct
  source 1..5368: mol_type = other DNA
atgcaatttcagctggccctgtttttgcaccttgggttgctcagttgctcgaaagctcaagatgaatgtaacaggggtgtctgtcatcctaccactggcgatctcctagtggtggcgctcagctaacgacttcttctacctgcaggctgagaggagcccagaaatactgcatcctcagctacctggaggtgggggagcaaaaatgcttcatctgtgactccaggcttctgtatgacccatatatccaacccaacagccacaccactgagaatgtaattacaagttttggaccagatggagaaaagaaatggtggcaatctgaaaacggtcttgatcatgtcagcatcagactggacctagaagcattatttcagttcagccatcttatactgacctttaagacttttcagcctgccgcaatgttagttgagtgttgcgcggactatggacgcacctggaaagtgttgaagtatttcgcaaaagactgtgctgcttcctttcccgacatctcatctggccaggcccaggaagtgggagaccttgtctgtgactccaaatattcagatattgaaccctcaactggtggtgaggttgttttaaaggttttggatcccagctttgaaatagaaaacccttacagtccttatatccaggaccttgtgacactaacaaacctgaggataaactttaccaaactccatacccttggggatacttcgcttggaaggaggcagaatgattcccttgacaaatactactatgccctgtacaggatggttgttcgagggagatgcttttgcaatggtcatgcgagtgaatgtggcccaatgcagaaagtgagaggagatgttttcagccctcccaacatggttcacggtcagtgcatctgtcagcacaatacagatggcccgaactgtgagagatgcaaggacttcttccaggatgctccttggaggccagctgaaggcccccagaacagcacttgcagaccgtgtaactgtaatggccactctgaccgctgtcactttgacatgaccgtgtacctggccagcggcagcctaagcaggggcgtatgggaagactgccagcaccacaccgaggggcagccctgcgaccactgcagaccccttttctacagggaccccctcaagcccatttcggatccctacacatgcattccctgtgaatgtgaccctgatgggactttatctggtggcatttgtgtgagccactctgatcctgccaaggcgtctgtggctggccaatgcctgtgtaaggagaatgtggaaggaaccaagtgcaacaggtgtaaacccaaccactatggactgagtgctagcgatccccttggctgtcagtcctgcaactgtaacccccttggaagtctaccattctcaacctgtgacgtggatacaggccaatgcttgtgccagtcatttgccaccgggccacactgtgaagattacactgtgggatactggggactgggaaatcgtccccatggatgttctccctgtgactgtgacattggaggtgcttatttgaacacgtgctccctcagggatgggcagtgtgaatgtcgcccccatatcactggccgcagctgcacagagccagcccccggctacttctttgctcctttgaatttctatctctatgaggcagaggaagccatgccactccagggcctcgcgccttcgggcttggtgatttttggccaggcacctgctgttcacatcgttctcccagagccagttcctgggaaccctcatacatggactggccctggattgccagggttctccctggggctggtttgagatttgctgtcaacaacgttccttttcccatggacttcactatcgtcattcactatgaaactcagtctgccactgactgggctgtccagattgcagttaatccccatggagggaggcagcactgcacacgcaagaccccacaagcaaagcccctgtcttctgctttaccagcgggtgtcagaatcatgctgcttcccacaccgatctgtttagaaccagatgtgcaatattccatagatgtctacttttctcagcctttggaaggagagtcccaagctcattcacatatcctggttgattctcttggtcttattccccagatcaattctttggagaatttctgcagcaaacaggacttagatgagtatcagctatacaactgtgttgaaatttgctctaaaatgggacctcaagtgctccctgatgcatgtgaaagacttatagccagcgtgtctgctaagctacacaatgggaccgtggcttgcaagtgtcatccccagggctcagttggggccagctgcagccgcctcggaggccagtgccagtgtagacctggtgtggaggggcgctgctgtgacaggtgctcagcgggaagctacggcctgggccatcacggttgtcactcatgtcactgccaccctcaaggctcaaagaactctttatgtgaccaaataacgggacagtgcccctgccatggagaagtggctggctgccgctgccatcagtgcctagccggctattttggatttcccaattgccacccttgcccttgtaatgggtttgctgagctttgtgacccagagacggggtcatgcttcaattgtggtggttttacaactggacgaaactgtgaaaggtgcatcgatggttactatggaactccttcttcaggacaatcctgccgttcttgcctgtgtccagatgctccctcaagcaatcagtattttgcccattcctgttttcagaatccttggagctcagacgtgatctgcaattgtcttcaaggttatgcaggtattcagtgtgaagaatgctccgctggtttctacagaaatccaagaatttcaggagcactttgccggccttgtggctgcaataagaacatcgacgtgaccgatccagaggcctgcagccgggtcacaggggagtgcctgaggtgtctacacaacactcagggcccaaactgccagttctgcaaacccggtcactttggatccgccctcaatcagacctgcagaagatgctcctgccacccttccggtgtgaaccctgctgagtgtccctctggtcagggaccctgcctctgtgaccctgccactggctcatgcccatgtctgccaaacgtcaccggcctggcttgtgaccgctgagctgacggatactggaatctggtccctggtagaagatgtcggttatgcgactgtgacccccaaacttctcaaagtagccactgtgaccagcttacaggccaatgcccatgtaaattaggctatggcgggaaacgctgcaatgagtgcaaggagaattattttggcaatccaccagggccatgtgtttcatgtgactgcaacagggaaggtacccagacgcccgcctgtgaccggaacacgggcaggtgccgctgcagagagggtgtcggcggccagcgatgcgatcactgcgcccagggttacggccaggaattccctacttgtcttcggtgtcactcgtgctttgatcaatggaacctcgtcatttcttccttctcaaaagtggtgcaagggttaatgaggctagttgttaacatggaagataaaagagggaccctgcctgtctgtgaggccaacttgaaaggcctcagagagaacatgtctgaaatagaaaggattttgaagcaacccattttcccatctggggaattcttcagagtcaaggattatcagagtcaaggattatcatgactctgttcggaaacaaatcttgcacctaagtgagcaactgacaacagcgtatgcatttcaagactggaacaaaacaatagtaagactgaggaatgaagcagacctcttgctggaagaccttcaggaggaaattgatttgcactccagtgcccaagttgcaagcattaccgattcctcagagaatatcaagaagtattatcagatgtcatcgtctgctgaaaagaaaactaacggaactacttccgtcataaataacactgaaagcaccaggaatgacttacctaccatcttagatacaataacctcaacaggaaacttgtctttggaaaaattaaagcagattaagataccagatatccaaatattgaatgaaaaggtgtgtggaggaccagggcacctgccctgtgtgctggctccctgcggtggagctccctgcaaaggccctgaggggcacaggtactgcggcggcctgggctgccatggtgccctggccctctcgtggaacgccctccagaaaacccaggaaacagaaactgtgattcagaatttggacagccagattcaagggttgaagaatcagatcaaaaatataagtaaactgacggaagtctccaagaccagtgctttactgttaagtgagaaactgcataatataaaaaaccgaagtgaatctgaaaaagataaaatgaatcttttaatcaaaaaagtgaaaaactttttattagaggaaaacgtgcctccagaggacatagagaaggttgcaaatcgtgtgcttgacatccatctactaataacatcacacaatctaacccacgagcttgacaaaataagagaacttctacaattctgtgaagactacagaacagatgaaaataaactgcaaaaaacagtggatggaacccagaagctgtcggtgaaggcaaaagtagctgagaacacatcaaatgctctgttaaatcttgacaaaatgttgatcatgttgcggcaagttcaaatcactcagggacaggcaaatgctaccatcacacagctgactgctgagataacacaaatgaaaaagaatatactgcagatggaaaatcaagccacgaaggctaagaatgagctgggatcagcacagcagcagtcaaagctgaaggatggacttcccctgctgcggcccaagttacaaaggaatcgagaccaagctgccagtgcaaaagctcaggctgaatctgccctgctcaaggctggccgcatggcgaaggggtttgttgagctgaaaaaacaattttctattcttcaatgtaagacaagcagtactggactgacaaaggaaacattaggaaaactgaaacagataaaagatgcagcagaaaaattagctggagatacagaggacaagatgagacgaataacaggtttagaaaagaagattgaagatttgaatgtaagcaagaaaaagctgatcaactgagatgtttggaaaatctagtcactgccatcaaaaatgaaattgttgagcaaaaaaataaacatgcttcctgctatactttggcagagtccaagtacaaaagcctgtgcactggtttctggcttccaacaagcaaacaggcagagctgtgctga

SEQ ID NO: 9 - DNA, 4275 bp, synthetic construct
  source 1..4275: mol_type = other DNA
atgggagacttcattacctccactaagaggtccatagaagggggccatggagtaggccccatagtagagggcagggagcatggtggatcattaaccagctgggagccaggaggcatgtccattggttctaccctggttaggccggagctgttaccagggaaggaggccaccttaacctgctgcccaggagctggtctgctgctcaccctgcatctggcctggcctctggccccactgccccctcccagagccaggatggctgaggctggcctgaggtgctggctgctgtatgtcttgctgctgcacttggcccaggcacagccatacacgcccatccaccaggctggctactgcgccctctacgaagagtgtgggaagaaccctgagctgccggggagtttggcagagctgtctaacgtcccctgcctgtccaacacgcctgcccgccacgtcgcgggccagcacctgatcctcctgcggcgtatctgcccccgcctctacaatggcctcaacaccacctatgcctgctgctcctccaagcagctggagtccctggagttaagcctggccatcaccaaggctctcctcacacgttgcccagcctgctctgacaacttcgtcagtctgcactgtcaaaacacctgcagccctaaccagagcctctttatcaacgtgactcgtgtcttccagctggccactgggcagcctgcagcagtgctggcttaccaggccttctaccagcgcagctttgccgagcatgcctatgactcctgcagccttgtgcgcattcctgcagccgcctcgctggccgtgggcaccatgtgtggtgtgtatggctctgctctgtgcaatgcccagcgctggctcaacttccagggagacaccagcaatggcctggctccgctggagatcaccttccatctcttggatcccagccaggcccctgggaatgggatacagcttctgaactcagagatcgtgagctgcaacgagtcccaggggattggcagcccggcctgctcgtgccaggactgcgcaacatcctgccctgacattgcgcatccccaggccctggacgccaccttccgtttcggccagatggcgggggcccttgccctggtgatcatcctctgctctgccttagttgtccttgttgccttccttgtgcaaccccgcctggcccattgcagggacaaggacaaggacaaggacaaggcagtggaccctggtgtgcacacaagcttctttgacaggctcagcttcgccacccataagctcctgagcagcttcttccaggcctggggtacatgggtggcctcatggccactgaccatcctgggagtgtccattgcagtggtgctgggtttggcggggggcctggcctttgtggaactcaccacagaccccgtagagctgtggtcagcccctaacagccaagctcgatgggagaaggagttccatgaccagcattttggccctttctttcgcaccaaccaggcgatcctgactgcacctggccaggccagctacctctatgactctctgctcctggggcccaagaacttcagcggggtcttgtcgcctgacctgctgctggagctactggagctgcaggagaggctgcggcagctgcaggtgtggtcacccaaggagcagcgtaacgtctcgcttggcgacatctgctacgccccactcaacccacacaatgccaccctctcagactgctgcgtcaacagcctgctgcagtacttccagaacaaccgatctcacctgctgctcactgccaaccagactttcatgggtcagacctcccaggttgactggagggaccacttcctctactgcgtcaacgcccccctaaccttcaaagatggcacagccctgggcctgagctgcatggccgactacggggctcccgtcttccctttcctcgcggtggggggatacaaagggaaggactattccgaggcagaggccctgatcatgaccttctccctcaacaactacctgcctggggacccccggctggcccaggtcaagctgtgggagttgggcttcctggaggaggttcgagccttccagcggcgaatggcaggcaccttccaggtcaccttcatggtggagcgctccctggaggacgagatcaaccgcaccacatgggaggacttgcccatcttcgccaccagctacattgtcatcttcccgtacatcgccctggccctgggcagctactccagcagaggccgaaggctggtggactccaagggcacactgggcctgggcggggtagcagcggtgctgggagcagtcatggctgccataggcttcttctcctacctgggagtcccctcctctctgatcatcctccaagtcgtgcctttcttggtgcttgctgtgggtgctgacaacatcttcgttcttgagtaccagaggctgccaaggaagcctggggagcagcgggagcagcacattggccgcaccctaggccacgtgggccccagcatgctgctgtgcagtatctctgaggccatctgcttcttcttagggatgctgacccccatgccagccgtgcgcaccttcgccctgacctgtggctttgcggtggtgctcgacttcctgctgcagatgttggcctttgtggccctgctttcccttgacagcaagagacaggaggcttcccgcctggatgtctgctgctgccgcagggcccagcagccgccccagcccagccatggggaggggctcctgctccgcttcttccgccatgtctacgtgccagtcctgctgcacaaagtcacgcgtgcggttgtggtggtgctgttccttgccctgttcggagtggggctctattacatgttctacatcaccgtgggccttgaccaggaactgaccctgcccaaggactcatacctgctcgactacttcctctctctgaaccgctactttgaggtgggggcccccatctactttgtcaccaccgcgggctataacttctccagcacggctggcatgaacggcatctgctccagcgcaggctgtgacagctactctttaacccagaagatccagtacgccaccgagttccctgagctgtcttacttggccatgccagcctcctcctgggtggatgacttcatcgactggctgaccccatcctcttgctgccgcctctacgcctttggctccaataaggatgaattctgtccctcaactagcagttccttgagttgctctaaaagctgcatagcctttactctgggccctgtccggccctcagtggagcagttccacaagtacctcccgttgttcctgaacgacccgcccaacatcaactgtcccaaagggggcctggcagcttacggtacctctgtgaacatgagcctagacggtcagattttggcctcccgattcatggcctaccacacgcccctgaggaactcacaggattacacggaagccctgcgggcgtctcgagccctagcagccaacatcactgccagcctgcggaaggtcccggggacagacccagccttcgaggtcttcccctacacgatcagcaatgtgttttatgagcagtatctgacggttgttcccgaggggctcttcatgctgggcctctgccttgtgcccacctttgctgtctgctgcctcctgttgggcatggacctccgctctggcctcatcaacctcttctccatcgtcatgatccttgtggacactgttggcttcatggcgctttggggcatcagctacaacactgtgtccctcatcaacctggtctcggcggtgggcatctcagtggagttcgtgtcccacatcacccgctcctttgccatcagcatcaagcccacccgactggagagggccaaggaggccaccatcaccatgggcagtgcggtcttcgctggggtggccatgaccaacctgcccagcatcctggtcctgggccttgccaaggcccagctcatccagatcttcttcttccacctcaacctgcttatcaccgtcctgggcctgctacacggcttagtcttcctgcctgtggtcctcagttacctggggcctgatgtcaaccgcgctttggtgctggagcagaggcaggcggaggtcgctgctacggccaaggaggccacagccagggaaaatccctgcttgacgtatccttccgtgacccacatgaccaacaatgtctacatcaacgaagactttgaacatgatgtcaaaagtgccaacgatgtggatagttctttgcctaatagtaggcaggtgctctga

SEQ ID NO: 10 - DNA, 3260 bp, synthetic construct
  source 1..3260: mol_type = other DNA
atgactctaagaccagtgcccttggtcctgcccaccccccagaagggtcagatgcccacccatgtgctctctcataccctctgctctccacttccagctccagtggcccctagcgaagtgatggagacagcagctggggtgtgcaaattcccacagcggaggctaagctggtggcaggcccaagagtcctgcgaacagcagttcggccacctggcactggggcccccagatggggtccttgctctgcagctgcgcgaccaagtctggatgggccagaaaatgctcttctgcggagacccccgcagaggcgcgcgcgcaccatgctcgcgctggtgttcggcgagaagacagcggacagggcggcgtggctgcggacgcccctgccagcgctgggggcacttacggcgtgcgctcacgtgcagtgggacaccgcctcgcccgacgcggccacgctcttctctcttgcggtgccctcgctagccaacgcgctgcagctgcgcgccttcgccgagcccgggggtgcggtgcgcgccgcgctagtagtacgcgggcaccatgcgcccttcctcaccgccttccgcgctgacggccgctggcaccacgtgtgcgtcacttgggagcagcgcggcgggagctgggcactgttggccgacgggcggcggcgatccggagcccggggtctgggcgctggccacccggtgccccccggcggcgtccttgtgctgggccaagaccaggactctctaggtggcagcttctcagtgcgagacgccttcagcggcaacctcaccgactttcacttgtgggcgcggacgctaaatcccgctcaattgcgccgggcaagaacctgcgcaccacccctcggcggtctgctgttcggttgggacccgggcgccctagacgtcactccctcgctgctacccaccgtgcgggtgcgccttctttgtcccgtgccctcggaggagtgccccacgtgggacccaagacccggcactgagggctccgagccctgcctgcagccgcggcccttcctctgctgctaccagacagagatctatcggcagctgcaggatgcccagtcgtggcccggccaggatattatcagacgagtcaatgccttggccaatgccactgtgctgccccctgaccccctttctgaagtccatggggccctgtcgccgaccgaggcctcctacttcctgggcatcctggagagagtcctggcaaaggaggtagctccactagggccagctgtgctactggctatcgtgcactttctgaagagggtggcggcccttgaggctggggaaccggagcccctgactgggccctgggagcagctgggccagggcgtcctgtctgtggccagcctggttctggaggagcagttggccaacacgtggctgtcagtcagcaaggtggttggtggacccatggctctggtggcaagtgtgcaccacctggcacccctgctgagcaccatactaacctctgaacgatcccgaatgtacatccagcgcccccatgcgggcctggaggtgcggagcctatgcttgagagaggccagcatagggggctacacattcacgatgcctgacgggcatccagaggggcctggtcacatccacgtccccgcaggtgaagtgaagcgactccttgggaaaggcctctctggagtcaccctgatccacagctggttcacctcaagtgtcttccagtacaccatgggaggtcctggccgagaaccccaggctcctgacagctcagaggaggtgggcaggatgcagaggttcctaagcacacaggtagggtcagccatcatttcctctgatgtgtgggatcccaccggggaggtcaacacagccgtcacctttcacctgaaacaccaggctcaggccttccctcagaagctggtggagcccatctgtgctttctggaacttcagcagtagcccggacacaggtggctcctgggccactactgggtgttccatagctgccctgtaccaggactccactgcctgcttctgtaaccacagcaccaactttgccatcctgttacaggtgtatgacatccagagaggccctgaggaggagtcactgctgaggactctctcatatgtgggctgtggggtgtccttctgcgccctcgctaccaccttcgtgctcttcctggcagccggggtccctaagtcagagcgagtcacggtccacaagaacctcaccttctccctagcctctgcagaaggcatcctcatggccagtgagtgggcaaaggccaataaggtggcatgtgtggccgtcacagctgtgatgcatctcctcttcttggtcgcattctcctggatgctggtggaggggctgctgctgtggagcaaggtggtggctgtgaacatgggcgcggggctgaggatgaggctctactatgccacaggctggggtgtgcctgtggttatcgtggccatcaccctggccatgtccccccatgactacatggcctctgggcactgctggctcaacgtgcacacagacaccatctgggcctttgtggggcctgtgctcttcgtgctgactgccaatacctgcatcctggtcctcgtggtgatggtcaccgtgtccagtgcccgccgccgtgcccttatgctgagcccgcagccccgcctgtagcagcagatcaggatccagttgtgggccacagtgaagccggtgctggttctgctgcccatcctgggactgacctggctggtaggcatcctggtgcacctcaacccagcctgggcctataccgccgtgggcctcaattccttccagggaccgtacatcttcctggtctacgccgcctgcaaccgggcggtccgcagcgccctacaaaggatgacggagaagacggcggcccagggacccatggccccataatccccatgaccttctcctccattgcagagcccgagagaccgttactggcattcaaaacttcaggctcccatacccccacccctgcaggcgcagcacgtctgcaggaacaagagagccacagcagcgcctctgcgctcaagtgacagcgcctttgtcttcattgaatgggattgtagagacggtgcatccgggactttcctccaaaccttgccccaactggacagctctgccagggtacctcgggcctggggactggattcaaccctagataggatgaaaggcccggctggcagccccagagtaagcagcagcaccttgtccacctcctgcaactaccggccttag

SEQ ID NO: 11 - DNA, 459 bp, synthetic construct
  source 1..459: mol_type = other DNA
atggactcgggcgccgaggagtacgagctcaacggcgacctgcgcccggaattccccgaagctccgcacacctcggtgccgccctggggccagagaagcgagctcatcaacatgaaccgttacgccaacaagaagagtgtggctgagagcatgctagacatcgccctgctgatggccaacgcctcccagctcaaggccgtgattgagcagggccccagcttcaccttctttgtgccccttgtagtccttatctccatctcccttgttctccaggttggcgtgggcgtgctgctcatcttcctcgtcaagtacgacctcaacaacccagccaagcatgccaggctggacttcctcaacaacctggccacgggcctggtgttcatcatcgtggtggtcaacatcttcatcatggcctttggtgtccagaagccgttgatcgatgtggcgccccagcagtag

SEQ ID NO: 12 - DNA, 14526 bp, synthetic construct
  source 1..14526: mol_type = other DNA
atgagtcgtccagagtccatgcagggggtgacagaagtgacactgaagaccgaggtggaggttggagccagcggctacagcgtcactggtggtggggaccaggggatctttgtcaagcaagtgctgaaggagtcctcggctgccaagctcttcagtttgagagaaggggaccagctactcagtacgaccatattctttgacaacatcaaatatgaagatgctctcaaaatccttcagtactcagagccatacaaggtgcagttcagaatcaaacggaaacttccagacagagaggatgaggagggggcccacagtggtgctcagcacggcccaaagggacccgagaagcaggacaaggaggtcgccgatgggtgtacagagagccccataaagacactggaaggaggtggggaccaagacagtctccttcccaaggccagggagggacgcggtcggcgaccccagaaggagaggctctcctggccaaaattccaaacaatgaggcccaggtatctgcaggggccccggcggtcacacagctcctcggaggcctacgagcggggtgcccctgaagtgtcccccacgagcacagacacggaggcccagcttccaggggaggagcaggagttgcagggtggccggcgcacgaggaagttcctgagcctgcggttccggacgggctcggggcgcccaggcaaaggggcccagggggagccagttccaggagtcctagaggaggcagaaaccctggacacaggggtctcgctgagcacggagcccagcggctttggggagcgactgccagaagaggtgtcaggccctgaggccagactcagaaagaagaccaaggaggacagagcccaagaggaagcagatgggcagatgggccccaggggtggccctgcccccgagcaggccttggagggaaatggggatgcagtgcggggactagaagtcgggatcgctaaactgtgtttgcaagatgccactgtggccagtggcacacagagcagcccaccagaaatccgggtccgcatcccccatttgcagacaccccgttttggggtctccaaacaaaaagtgctggatgcagagacaggcatctctgaaccccagctggggccatggccaggaaggctctccggagaggggcctgggcccagggtgaaagtggagggggaagaagagagcctgggggccagaacaccccaggagggcttgccagaacacggggatcagagaagacaggggcagagagcagagcaggctggaggaatagtcggggccgaagaaaaagatgtggagggcatcgagggaaagctaaaaatgcccaagttcaaaatgccctcatttggatggtcacccagcaaggaaccaaaaacacctggggcaaaacatccacaagaagctagaggcagccaggtcacagctgggacagaaaggccacaagagaaagccagtagactggaaacagaacacaaacatgacgacaaacaacgaagaacatccataaaactaccaggaggcagagcagatggtgtgagcctggaaggtgatgtgtccctggcagacaaggatgtggtcgtcaaagacagcaagttcaagatgcccaagttcaagatgccgtccttcggggtgtcagcccccagcagagaagtggcatcctctgtggatgtgtccttgcccaaggttgatggggaagcatccctgccctccctggagggaaacatccaagctgtggaagtgaaggcacagctgccagcaaggaaagtggacacgagtagagaggccatcagcatgaaaatgacagagggagaggtgtcagtgggagacgccagggtccaagacgagggagctgagctaaaagggaacatgcctatggtccagattccaggaaccaagatgccaaaggtggacctgaagggccccaagatggacgtcagcctccctgatgtgaacctgtcgctgcccaaggtctcagtggactctcgggctcctgggtactctggagaaggtgtgaaggtggaaggagatgtcaagaccaaggacagcaagttcaaaatgccctctttcaagatgccatccttcggcatgtctactccaagcaagtctatccagccatcagtggacgtgtctctgccagaggcaaaagtggatgtctaccttcccttgattgagggagaaatcaagacagctgacctcagcattcaactcccatctactgacattgaagtgaagggtggcgaggtgggcattaaggtccccgagggccagctgcctgagggagaggtcacgggagaggccattggaagtagtctcaaagggcatatacccaagttccagatgcccaaaatggaattcaaagcccctcaggtggacatcaagggacccaaagtggacctgaagggtcccaaagtggacttgaaagcccttaagggggagatggctacccctgatgtggacgtgtccttgtcaagcgtggaggtggacatccaggcaccaggcaccaaggtggagggcgacatgcctggggatgtgtccctgccaagcatggaggtggacatccaggcaatgggcaccaaggtggagggtgacgtgtccataggagacaaacacttagttgtgaaagacagcaagttcaagatgcccaagttcaagatgccatcctttggcatgtctgcaccaagcaagtcaattgaggcatcagtggacatatctctgcaggaaacacaggtggacctgtccctcccctcccctaaggaagaagtcaagactggtgacctcagcattcagctcccatctgctgacatggaagtgaaggatggtgaagtgggcatgaagctccctgaaggacagttgcgtgaaggccagctgccccagggagagctctcaggaaaggctgtgggagacggactcaaagggcacctgcctaagttccagatacccagggtcaagatgcccaaagtggacttcaaggcccctcagggggacaccaaggtccccaaaatggatctgaagggtcccaaattggacataaaagatttcaagggggaggtggaaaatgcagacatggaggtggctctgccaagtgtggaggtggacatccaggtcccaggtgccaaggtggagggtgacgtgtccctgggagacaaagacttggccaccaaagacagcaagttcaagatgcccaagttcaagatgccatcctttggggcatcagctccaaggaaggacttggggacctctgtggacttgccaaggaccaaagtgggtgtggagtcagccctgccctgcctgggagtagagactgcatccgctgcggggagcatcccaatgccatcttctgacatcagtctaccaagggctgagctggacgtgtcccttccagaggtagaggtggctgctggagacctgaaaggcaatactgaaggggcaaggatcaaagggcacctgcccaaggtccagacaccagacatcaaggtgcccaaggtggaactgagggacatcaccctccccgaagtggatgttttgctgcccaaggttgaggtggatgccctggctcccgggatctccatggagggcatgaaggttgaactaggcatcaagatggaagacaaggatgtcaagaacaaagacggcaagttcaaaatgacctctttcaagatgccatcctttggcgtgtctactccaagcaagtctatccagccatcagtggaagtgtctctgccagaggcaaaagtggacgtctcccttccctcgactgagggagaaatcaagactggtgacctcagcattcaactcccatctgccgacatggaagcgaagggtggcgaggtgggcattaagttcactgagggccagctgtccaaaggagagctcacgggagagactgttggaagtggtctcaaagggcacatgcccaagttccagatgcccggtatcacgatgcccaaagtagacttcaaagcccctcaggtggatatcaagggaaccaaagtggacctgaagggttccaaagtggacttcaaatcccttaagcaggaggtggccacccctgatgtggacgtgtccttaccaagcttggaggtggacgtccagatgccagacaccacagtggagggtgacacgtctgtgggagacagacacttagttgtgaaagacagcaagttcaagatgcccaagttcaagatgccatcctttagtgtgtctttaccaagcaagtcaattgaggcatcagtggacatatctctacaagaggcacaggtagatgtgtccctcccctcttccaagggagaagtcaagactggcgacctcagcattcagctcccatctgccgacatggaagtgaaggatggtgaagtgggcatgaagccccccgaaagacaggtgcctgagggccagctgtcccagggagagctcacagcacaggctgtgggagacgaactcaaagggcacctgcccaaattccagatacccggcgtcaagatgcccaaagtggacttcaaggcccctcaggtggacatcaagggccccaaagtggaaccgaaggggccaaaattggacatgaagggtttcaagggggaggtagaaaacacagacacggaggtggctctgccaactgtggacgtggacatccaggtgcagcgtgccaagacggagggtgatgtgtccctgggaagcaaagacttagctactaaagagagcaagttcaagatgcctaagttcaagatgccaaccttcagggtgtcagctccaagaaagaacttgggaacctctgtggacttgccagagcccaaagtgggtgtggagtcatccctgacctccctgggaggagagatcccacccactgaggggagcatcccagtaccatctgctaatatcatgctaccaggggctgagatggacgtgtccctcccagaggtggaggtggctgctggagagctgaaaggcaaaactgaaggggcaaggatcaaagggcacctgcccaaggcccagatgcctgacatcgagatgcccaaggtggacgggaagggccccaaggtggacatcagccttccagaagtggacatgtcgtttcccaaggttgaggttgatgccccggctcctgagatctccatggagggcatgaagctggaaggagatgtcaagatggaagacaaggatatcaaggccaaggatggcaagttcaaactgccctctttcaagttgccatcctttagcgtgtctgcccaaaccaagtcaatggaagcatcagtggacttgtctctgccagaggcaaaagtggacgtgtccctcccctccttggaaggagaagtcaagaccagccacctcagcattcaagtcccatcttcagacaaggaaggaaatggtggcaaggtgggcgtgaagctctccaagggccagctgcttgagggagacctcgcaggacaggccttgcgagctggactcaaaagacaccagcccaagtcccagatctctgacataaggatgttcaaagcggacttcaaagcaccccatgtagacatcaaggggccaaaagtggaactaaagggctacaagatggacgtgaaaggcctcaagggggaggtggccacaacagatgtgcagatgtccctgcctagcatggaggtggacaaccagacaccagaagatgatgtgaccctgggagacaaagacttggccaccaaagacagcaagttcaagatgcccaaatttaagatgccatccttcggggtgtcagctccgagcaaggacttgggaacctccgtggacttgtcagggctcaaagtgggtatggactcatctctgccctccatgggagtagagatcggacccactgaagggagcatcccagtgccatcttctgacgttgccctaccaggggctgagctggacgtgtccttcccagaggtggaggtggttgctggagagccgaagggtaaaactgaaggggcaaggatcaaagggcacctgcccaaggtccagatgccagacatcaagatgcccaaggtggatctgaagggccccaagatggacatcgacctccctgaagtggacatggcactgcccaagtttgaggtggatgtcccggctcccaggatctccatggagggcatgaaggtggaaggagatgtcaacatggaagtcaaggacatcaagaccaaggacagcaagttcaaactgccctctttcaagatgccatcctttggtgtgtctgtaccaggcaaatccactgaggcctccgtggacatgtctctgcctgaggcacgggtggatgtgtccgttccctccattgaggaggaagaagtcaagatgggtgacctcagcattcaactcctgtctgccgatatggaagtgaagagtgacaaggtgggcattaagttccctgagggccagctgtccaaaggagaggccgttggaagtggtctcaaagggcacctgcccaagttccagatgcccagtgttacgatgcccaaagcggacttcaaagcccctcaggtggacatcaaggaacccgtactggatctgaagtgccccaaagtggacttgaaggcccttaaggaggaggtggccacccctgatgtggacatgtccctgccaggcatggaagtggacatccaggtaccatgggccacagtggagggtgatgtgtccctgggagacaaagacatagttgtcaaagacagcaagttcaagatgccatcctttggggtgtcgtctccaaggaaagacttggaaacctccgtggacttgccagggcccagtatgagagctgagtcatccttgccctcccttggagtagagatcacacctgctgaggggagcatcccggtgtcatctgctgacatcttcctaccagggactaagctggacgtgtccctcccagaggtggaggtggctactggagagctgaaaggcaaaactgcaggggcaaggaccaaagggcacctgcccaaggtccagatgcccgacatcaagatgcccaaggtggacctgaagtgccccatggtggacatcagcctcccagaagtggacatgttgccgcccaaggttgatgtggatgccctggctcccgggatctccatggagggagtgaaagtggaaggagatgccaagatggaagacaagggtttcaaggccaaggaaagcaagttcaaaatgccctccatcaagatgccatcctttggtgtgtctgcctccagcaagtcaatggaaccatcagcggatgtgtctatggcagaggcaaaagtggacgtgtccctccactccttggagggagaagtcaagaccagtgaccttagcattcaagtcctatctgctggcaaggaaggaaagggtggtgagctgggcatgaaactccccaaggaccagctgccagagagagacctctcaggacagtctgtggcaaccggactcaaaggacaccagactaagttccaggtgcccgacatcaagatgccccaagtggacgtcaagacccttcatgtggacatcaagggccccaaagcggacctgaaaggccccaaaatggacatgaaaggcctcaaaggggaggtggccacaacagatttgcagatgtccctgccgagcatggaggtagacacccaggcaccggaaaaggatgtgtccctgggagacaaagacttggctaccaaagatagcaagatcaagatgcccaaattcaagatgccatccttcggggtatcagctccgagcaagggcttgggaacctccgtggacttgccagggcccagaatgtatggggagtcgtctctgccctgcctgggagtagagattgcacccactgagggaagcatcccagtgccatctgctgacatcagcctaccaagggctgagctggatgtgtctctcccacagatggagatggttgctgcagagctgaagggcaaaactgaagggacaaggatcaaaggacacctgcccaaggtgcagatgcccaacataaagatgcccaaagtggacctgaagggccccaaggtggatgtcagcctcccagaagtggacgtgttgctgtccaaggttgaggtggatgccccaactcctggtatttccatggagggagtgacggtggaaggaggcatcaagatggaagacaaggacatcaagaccaaggacagcaagctcaaaatgtcctctatcaagatgccatcttttggtgtgtctacgccaagcaagtccactgaggccttggtggatctgtctctgccagaggcacaggtggacgtgtcccttccctcgactgagggagaaatcaagaccggtgacttcagtattcaacttccctctgctgacgtggcagtgaagggtgacaaggtgggtgttaaggtccctgaagaccagctgtccaaaggagagctcacgggacaggctgttggaagtggtctcaaagggcacatgcccaaattccagatgcccagcgtcaccctgcccaaagtggacctcaaaggtcctcaggtggaagtcaagggccccaaagtggacctgaagggccccaaagaggacttgaaagcccttaagggggaggtggccaccactgatgtggacaagtccctgccaagtgtggagatggacatccaggtgccgggtaccaaggtggaggatgatgtgtccctgggagagaaacacttagttgtgaaggacagcaggttcaagatgccatcctttggtgtgtctttaccaagcaagtcaattgaggcatcagtggacatatctctgcaggaggcacaggtggacctgtccctcccctctcctaaggaagaagtcaagactggcaacctcagcattcagctcccatctgctgatgtggaagtgaaggatggtgaagtgggcatgaagctccctgaaggacagttgtctgagggccagctgccccagggagagctttcaggacaggccatgggagatggactcaaagggcacctgcctaagttccatatacccagtgtcaagatacccaaagtggacttcaaggcccctcaggtggacaccaagggccccaaagtggacctgaaggggcccaaattggacatgaaaggtctcaaggggaaggtggaaaacacagatgtggagatggctccgccaagtgtggaggtggacatccaggtgccaggtgccaagatagagggtaatgtgtccctgggagacaaagacttggccaccaaagacagcaagttaaagatgctcaagtttaagatgccgtccttcgggctgttggctccaaggaaggacttgggaacttctgtggacttgtcagggcccaaaattggtgcagagtcatccctgccctccctgggagtagagatcgcacccactgaggggagtatcccagtgccatctgctgatattgccctaccaaaggctgagcgggacgcgtccctcccagaggtggaggtggctgctggagagctgcagggcataactgagggggcaaggatcaaagggcacctgcccaaggtccagatgccagacatcaagatgcccaaggtggacctgaagggccccaaggtggacatcagccctcctgaagtggatgtgttgctgcccaaggttgaggttgataccccggctcccgggatctccttggagggcaagaaggtagaggaagaggtcaagatggaagacaagaatgtcaagaccaaggacggcaaattcaaaatgccctctttcaagatgccatcctttggtgtatctaggccaagcaagcccattgaggcctccgtggacatgtctctgccggaggcacaagtgggcatgtcccttccctcgattgagggagaaatcaagactggtgacctcagcattcaacttccatctgccgaagtggaagtgaagggtagcgatatgggcattaaggtcccagagggccagctgtccaaaggagagctcacgggagaggctgttggaagtggtatcaaagggcacatgcccaagttccagatgcccagggccacgatgcccaaggtggactttaaagcccctcaggtggatatcaaagaacccaaagtggacctgaagggccccaaagttgacttgaaagaccttaagagggaagtggccacccatgatgtggatgtatccctgccaagtgtgaaggtggacagccaggtgccaggcaccaaggtggagggtgacatgtccctgggagacaaacaattagttgtgaaagacagcaagttcaagatgcccaagttcaaaatgccgtcctttggggtgttggctccgagcaaagacttgggaacctctgtggacttgccagggctcaaagttggtgtggagtcatccctgccctccctggaagtagagatccctcctgccaaggggagcatcacagtgccatctgctgacatcaccctacctggagctaagcaggacatgtctctcccagaggtggaggtagcagctggagagctaaagggcaaatctgaaggggctacaatcaaagggcacatgcccaaggccccgatgcctgacatcaagatgtccaaggttgacctgaagggcaccaaggtggacatcagcctccccggggcagaagccccactgcccaaggtcagggtggatgccctggctcccagggtatccctggagggcatgaagttggagggagacgtaaagctgggagacgaggaagtcaagaccaaggacagcaagttcaaaatgccctccttcaagatgccatcctttggcatatctgcgtcaagcaagtccatcgaagcatcagtggatgtgtctctgccagaggcacaggtggacgtgtcccttccttccttcgagggagaagtcaagactggtgatgtcagcattcaactctcatctgctgaagtggaagtgaagggtggtgaggtggatgtgaatctccccaagggccagctgccaaagggagagctcaaaggacaggccgtgggagaagaattcaaagggcacctgcctaagttccagatgcccagcgttgagatgactaaagtggacttcatggccacgcaggtggccctgaaaggctccacggtggatataaaagaccttaagggggagaaggccaccccagacatggaggtgtctctgcccagtgtcgagttggacatccagacacaagataccatggtggagggtgatgtgtcctggggagacaaggacatggtggtcaaggatggtaggttccaaacgccacgacacctgagcatggcttcatttgggaagtcatccagcagggtttccatgggctcgtctgaggttgcaggaagtgtcaaatgtcccgagttgacagtctccacagccaccatggacctgggtctcagtacctctggtcctgatgttcctgaacccagtgtggatgtggccacggcactgccagttgggaaagatggagagaaaagcaaagtgaagaaacctcacttcaaagtgtccaaaggcttctttctgcacttgaagtcctctaaagaccatgttgccctcgaccaggattctggggtacctcctcctctgcatgtctctgccacgccccctgatgtcacagctggtctgtcccaggaggaggttgtggacagtggtgcatggtccctgccagtccccaaggtgggcttggctggttttccatcagccaagctcgatctccatgttccgcgtgaggaatcctccgtcctcccttccagccagggcatcaccctaacaaagtatcaggtgatgctccctgtggccactgtgcatgctgagcttcctctggatacaattcctgtgtcacatactgacacacccctcctcagccatgaaggcttagttgagttgcagccccatgacagagccccagagtccttgacagaaactctcccaggccctgggggccccctggctcctgccacctacggaagggtgacttttcctaaattccataaaccaaagtttgggttttcagtcctcacagcagctgttcctgagggcgggggctctgtagctgagaaaatcgaggcgtccccactgccctgcactgttcttccatcagctgatacccccgtctgcatggggctggagggccactctggctctgatgacacagcagctgtggtgctgggagaagcaccccctgatgacactgagcatgaaggaaaggggagttccttcaaaacgcccaggttcaagctaccgtcactacgctggtctcccaagaaggaggcagggctgcaaggagaccccgagtgcagctctgcagacgcagagctcggcctgagtttagacctggatcagcctggcgactcgactgggattcacgtgccacaggtggaagtggatgcagatctgccccccgagaaagacagcctgaaggggaggatgagaaagtcgagctttgccatgccaaagctcccgttctccaagggaaagggtgcaaagggtgggcccagcgcgcgccaggaggagttccagccttgtatttctggccccgaggcagccacaggcaggaccatccgcgatgagggtgcggctggcggggccctggacggagaggcctgggaccccactttgggcctcaccaaacccatgcgtggaccctccaaggccgtggtgcaggtgagctgggtggaggccgccactcctcttcctgagcatgatccatctcttcaggagagcagtgtggggctcaaggacagccaagcgcattcaccccatggggaaggcatggcccccacaatgggacaggcgctcccgccacccagtgcaccaccgggcgccgacacctgcagagtggagagtctcaagggggacactgaggccactggggtgccagtgggctcgaaagatggctggttcagagtgcccaagttccacttgcctggcttccaacgcacgtccaccaagaagggtgagacaacagcagccgaggctcagggccccggacctcaaggtggggacacaacagctggagtgcagactcaggtggcccatgtccatgggttgacagtggaggcagctgtgtccccaaagcccgcagatgccgaggtagatgggatggcctccaagaccgagttgtacgcaaatgtcctgaaacacaatatccagggcccaggcttgagtctgtccctccccactgccggagcagctgaggctgatctctctgctcctgaggccagggtccatcctggtgaaggttcccttcccctccagatgcctggtgggagactgccagagggtcaggctcccccaggggagacaggcgagactgctcctccaggacctgaaggccagagccctaccagtgtgaaagaacgagcagaaatccagcttgcccacgctgaagggcctttgaaactgaagacttcgcagactgagttgccggcccaggtttccatcattcagatggaccggctctgggaggattccgtggtcaccgtcatgtttcccaagttgaaggcaccgcggtttgctttccgtgtccccagcacagacgctgacatctttgtcccctctgtgagagaagtaccatgcctggggacaggcactgagggggccttgcaaggagaaagccttgatgcgtggagcgccagcatcctgagggctggccccagggtccccacagagcagcctggagatgaaactcactccttagaagcatcccccatctccagggttagggtgcacacacagggtgctcaggtagaaggccaggcatttaccgcgcacagcggggtgacgccagcatccactgagtggtcagagcccaaggacttctctgctcagattgtgcgggagtcaaaggtccccgcatctgagatccaaacaccttcttacggattttccttgctaaaggcgaaaatcccagagccccatacacaggctagagtgcacgtgaccattcacggctctcaggtgggagagggctcagaagaggcctccaagcaagccaccccggacgtggaccctgtttctgcagacctgcagcccgacactggagaaccatttgagatcatctcttccagtgtcagtgtgctgagaccacaagcacgcctgtccgaagctcacgtcagccagcagggtgccgacagctgttccgatgaggagccagcggaaattctcgagttcccatctgaggacagcccagaggtggccgccctgtcggcagatgaagaagggggccaagaggagaagtcagcgagtaaaaagccttctggtctgttccggttttggcttccgaacattgggttttcttcttccgccgatgagaagagttccgatcccaaagatgatgtccaaagacctcccattccaacgcagcctgaggcgccaccaggggcagagctgcctgaaaaacaggagaaggagggctggtttcgatttcccagattaggcttctcctcttctcctaccaagaagagtaaaagtgccaaagacgaagcagagcatgcagaccaaagtctccaggaagagggagtggacttttttgatgcacgtgaaagcttctcccctgaagacaaggaagaaggtgggctggcagaggcctcgcatgccagagggagctga

SEQ ID NO: 13 - DNA, 3420 bp, synthetic construct
  source 1..3420: mol_type = other DNA
atgcctaaccatagtgggctcttacagggaaatggtgacacaagggtcaagaaaatcacgatggagtttccacttttatatgttgtgattttacttgtgaacatgtttgatttttcatcaggaatactatataataaaggtcaaatggagagatactttgcttgttcaagtgaagagttccccaaaaagaatgaaatattcaagttgtacctttcctcatctcacctggaaatccagtgttttttccaaattgaagatgaggttgcttcaaggggaattctaagcgtgtttacatcaggaggacttgctcccagtttggaaatcataaatagtacatatactggcatcttccactttaatttaactttgttcagtgatcgagtttactggttgattaatatccccagagaagacatcacaaaaaacacagatattacagcagtagaagaatggctagtaaggattagtttacatcacggattaaatatttatactactgaaggaactctattggatactgttcgagaacctattcttcagtggaatcttgggcttataatggaagaaagtaacgtcagtgcattatatccacatgtgatagatctcaaggtgacaaaatgcccctgcgccaatgacgtagcattgcttggctttgttttgaatacaacatttgatggtgtttacataggcgtcaccttttccggattttgggattatgataataccagctggtttaacatgacggagaatatctattcccaacttgaagaaggtctcacagaactttcattggtggatatggttttaacaaatcattttttggttattctcacctctttgggtctttttgtaagtagagatcttcgttacccatcagcctcagacttaaggttttcaagggcagacttttgtggttttgaaagggccgactacatcaaaggaaaattgtggtataatgaaagatgttttgctaacagagaaaaatttgaagttgattatgttactatcacctttgacagaaataggaccctaagtgaggcaagcacctgtttttacagtacggaaccattcctcgaatggtttccttgcataccttacgctttgagaagagtgagacacgttccttccaacgtgataacatttcttgttgacatagaacggtcaaatggaatttaccttttctctaaccagaaagaaacctctgcttctgtgcacgtcctaaaaaataatcgactaagttcacagagtaaattcccaaatttcttgtttccttcatcattctctgttcctgttggaatggtattccatccacgaagtaattttctatatgcttatggtaatcaggtatggctttcaatggatggcggcaacacttttgaattaatagctgactttcatggtgatgtcataaggaggtcttatcatagtttttatagttcagatattactttcgtttcccaacatggaaaggtttacttgacaaaggcaggattaaaaacatatagcgaaattggatctgttactcataaaatttttacattatactatgatcacttgggattcatacataagctgaccccagatcattttgaagcagatgagttaatatcagccgttggaaattctaaagctatttttgcggagaatcttgatatgggctttgagactgcacttgctccacagtttatctccttaaatgaaatgattttttatgcatatgtacctccgaatgaacctacagcaactatacacaccaagcaattcaacaatatccactctggaaaagtgatacaccacgggaaaactggatcagcttacataagaaaagtgttacaacataacaatcttaaaggatttttgtcttcagttattacagaaattatagatccttttggaatagaagaagtgagagagagctcttctttgtctagttccgttttcattactgatgttggaaatttctcctataaacttactcttaacttaaaaactccagatgttaattcttcatttcgacattgggatctccagaagacggtggtgattcctggttatagcagcttcctgatcacagcaattttagatgatacgaatgctttagctattgccaccatgcctaaaagagcacccgtcaatatgacctttctagaaaacacctggttcttatacaactttgggctaagtagtagaagaacgtggagaatattttcaaaacgatgtaattattggtttcaacaacttgataagtcactatccctcaatatcctgagatacgttgatcttggaaaatatcatactttaagtgttaagatcatacctcatgcaagaggttttcaaatgcttgatgtaccaccagtgaaagtattagttggaaacccaagtttgttggatgttagagctgaaggtttttttgatgatactggtagttatctactgaacattactttatctagcaaaattttacgccagggttcaagttcactggcatttgtcgtctgggaagcatcaactgagtgctttgttacaacattcgtgccaatagtgaaaaccagctgtagttatctcagatctatgcatcacattcctagtaaacttatcccattagaagactggattagtggaattcacaaagatgatcagggttttaatatgatcaaaaccttaccggtaaactacaggcctccgtctaaactgggaattgctattccactcacagataatttttaccacgcagatcctagcaaacctataccaagaaatttatttcttatgtcaaagaggactggtaaattcaaacagtgcactaatgcatctactcgggaagagtgtaactgcacaaatgatcagaaattttcacatgctgttgctttctcagactgcagagaaaaagttcctcgttttaagtttcctgttacacagtatccaatatctttgcaaatttccactaagaaaggaaatatgccagtgggtcttccatacctggtgactgtgactgaagtgaatatgagggaaaactggaaactaaaacattccacaccaccgactattagaaaactgcagtcgcacttaaaatcgcatcttcaggttccagtgtataaccctataggtctcaacttaagtataatgggctctgagctctttcacttcaaagtgtctgttgttccggggatcactttttgtaacttagttgaagaatttcagatttatgttgacgaagcacctttgccatttccaggacatacccttattgccatcgcagcagccatagtgctaggaggattaatttttgtagtatttatgtttcagctgcgtaacattcacccatggcagctatgccgaaaactgtttagaagaaacaaagtgaatttatcaagaatcgaggtctttcagcaggctcacaaaagaaaatctgaatggtga

SEQ ID NO: 14 - DNA, 24977 bp, synthetic construct
  source 1..24977: mol_type = other DNA
atgagaaggatgagtccagatgtacctctgctgaatgactacaaacaggacttctttctgaagcgctttccacagactgtgcttggaggccctcgactcaaattaggcttttgtgcccctccttatatatatgttaatcagattatcctttttctgatgccatgggttttggggggaataggaacacttttgtaccaattaggcattctggaagactatcataccgcagcactttcaggtggactgatgcttttcgctgcgtttgtcatccagtgcacaagtgtatatgctaggaacaaatccgtgacagtggaaagaatgctgaccacagatgtcttagcagaggaagatgagcatgaatttacaagttgtgctggtgctgaaaccatcaaatttctaattcctggcaagaaatatatagccaatacagtttttcattctgtccttgctggggtaatgtgtggtcttgggacgtggtatctgctccccaacagaataaccttgctgtatggcagtgtgggaggtactgctctactgtttgtctttggctggatgacattatgtataggagaatattcattaattgtaaacacagctacagagactgcaactttccaaacccaggatacttatgaaatcactcctcttatgagacctctttatatttttttctttgtttctgtggatcttgcacacaggtaaaaagctatcaaatactttataacttgctttgtttttaagtatacatagtaagagagctttccttagtattaagaaaatgaatctgtgaattaaaaatcatcaagaccaaactactggatgataggctattttatgattaatcttttaggactaatctctgttaaatattcatactaaagcagtcattcaaagttactgaagagttttttaaaaatcctttttatgagaaataagtaaatttttttcaatcctatgtttcattttgaataaggagctttgaatctgtaagagagcttagccgaagtctgaaaagagatggaactttcacatgggggggaggaagaatttaaaaaatttttatacataaatattatgtacagatagagtgaatttagatgagtagaagaacttatttctaatttttttgttgtaacaactaataatgatttctttaatgaattcattgcagaagaaaaccagaaaatagcattttttaacaaaattgtttgcaaaattatttgataatcttttttgcttgccttttctaaatctctttttctttctctgtttctatagattgcagctttctctttcccaggttagggtccaggtagaactgtacaggcgtttaaaaatatttagccagcttgtatactgaaactgacctattcttggatatttgtttgctattccttaactcttttccagttgtgttacaattatggaccagaggctgctgtattacccatgtagttcttcacctaagcagataaataaggggaaaattaatttataggagattgatttataattggtttcttagtaaaaaagatttactaactgaaatataattaagtgcttgattttttaaaatttagcagtaaattttaatttaaatatggatgtatacatatgacctcttttataagatttaagtttataagattattattttaaaaatacatattcttgaagttaccatctcactttgctatttatatacctgatatatttgtatacctgatgtatttttgcattgaaagtgataaattctgagttctttatgttaaaaaaaaaatctgttaatttataatttggttgctttgactttctgctttactcatttctaaatcaaaacaaatgaaaatgatttttactagacactagttggatttaatagttttagtgtttaaagtttgataattgcagaaagatcgttttcaactataaagaaaagacgaaggcagcttccaaatctataaagaaaaaaaaatgacataattgtgcagaattacctcccactccacttagagaaaatgttggcttgtagttaatctaataatcaagtgatctttatacagtaggcactatgctacagctaaatgagttatgaaatgcatgcacttttcaaatgtatatagctttcaaatttggacacttgtctgatacatcatattctgtcttagtttctatcttagttatctactgcttctataagccacacatgagtggctttaacaaacaaacttattttctcacagtataggaggctagaagtcccagttcagggcactggctttagaggaaggctttctctctctttcagttccaaaggaaagttcttgtcgctgagcttctgggcggtcttcatgtgttttgccatctctgcttctcttctttgctcatttgatctcctttatatctcaagagattcatttaagatacaccctacactaatccttctcattaacataacaaagacaacccatccccaaatgaaattataaccacgagcattaaaaaaaaaaaaaagctcttgccatggagttgcttacaactcatagtgaccctgtaggacagagtagaactgccccctagtgtttccaaggcgtggctggtgaattcaaactgccgaccatttggttaacaaccgaactcttaactgctgtgtcaccagggctccaaccatagacatagaggctagaatttacaacatgtattttgaagggacacaattcaatccataatagttttgtttctaagaaacgaaatgaaagtcccatagtgtagtgctcctctcttttttgccattatttattgtatgtgtcctggttatctactgctgctataacagaataccacaagtggatggctttaacaaagagaaagttattccctcacagcctaggaatctagaagtttgaattcagggtggcagctccaggggaaggctttttctctctgtcgactctgggggaatgtccttgtcatcaatcttcccgggtcatagagcttctcagcacaggaaccctgggtccaagggaaacactgttctcctggcccttgtttcttggtggtttgagttccccctatctctcttctcacttttctcttttatatctcaaaagagattgatttaagaaacaacctaatcttgtaaattgagtcctgcctcattaacataaccacctttcatcccacctcattaacatcatagcggtaggatttacaacacatagggaaatcacatcagatgacaaaatgtggacagtctcacaatactgggggaatcatggccagccaagttggcaaatattttgggggacacaattcaatctgtgacattctaccctttaaaacctagtttagccccccaaaattcatgtccttgccacatgtaaaacacattcaccccatcatatcgtacagcaaaagtcttaattcaactctaagtctagaatccaaaaattcatatgtgaaatctagaatacaagttgtctgcttccaaagtatggtgatagaacatccacaagctagacatttccattacaaacggaagaaattggacagaaagaagagataacaggcaccaagcaagtcagcagaacattacattagccctcaaggcttgaaaataatcctctgttagctgagacaatttatgtaatggccgtgccctccagactctaggtattggccatactctccagattctgagtggagacccctcagctttgggcggcaccattcttctagtccatctgagacctaggcagctctgcttcctgtgttccttgtctcttcagcttctgcttccttggactcttggccccttagccttggtacatgtgccctgctggggcaaatgcttcagagctctttagctgcactgataagtgcctagaggcaccccactctgtcagtaaacttcagctagaaggcattcaactctcctgctccatgagtctgcaagcctagctccactgataagtgcctagaggcgccccactctgtcagtaaacttcagctagaaggcactcaactctcctgctccatgaatttgcaagtctagctccaccgataagagcccagaggcacctcactccaccgggaagcctgctgcacaaagacagccttctcactcggtggatcagctcccgcgttatattgcactggtttcctggctctgctgctgctgcttctcccatctgcaccatctcgtttcttagtgatatgaggtccccatgtctctgctcacttctctcttttatgtctcgaaagagattgatttaaaacacaacctaatcttgtagattgagtcctgcctcattaacataactctctaattccacctcattaacatcatagaggtaggctttacaacacataggaaaatcacctcaaatgacaaaatggtggacagttacacaatactgggaatcatggcctagccgttggtagatactttggttttggttaaaattcaatccatgacactacccactacagttatattaataattttaaacaactttttcttgcacgtttttattttctcaaagagaagcattaaatctaaaatgctttgcttatagaccatcaggaattgtttgaatgaatgatgcatatttgtatcatcttagccactaaaaagaacgtcttttgtttttggcatgtggatcttagtgtatagagtttgaaatatttttatagttgttagcatcaaagcaaaaattttttttttcctccttgaagtctgagatttttttttaccctcaaaaagccctgttatgttatcaggaacaatagaatttaaatgtttttccatatgaagatctaaccacgataatcgtctatttgggtctgagtcttaggccacaggagagtaatcacagtgtctgtggttacttcagttatgttgtgctttatttatgatatccttatatataaatacttttctgtgccattgcttattgtttacttgaggaacaaaaagagatgtagggctaaatcaaatttgggtaaaatgtttcccaagcatacattatttttgcataggctatcctacccttgaatatgttagcaagagaagtatttccttaaaaagaaaaaatttatgcaaatcttattttcctcgaccttcctgtggcttagtgtatgtggtttgatttttttttattacgaatgttttcttcttagagataaatgaactttatttcagtactatgttatagaaagtattgtcagctaattcagcattcatgttaaccttgtgttcagtaattctctgtttataaaagtttgaaggacatacattatgaggccaagtgcgttagctggcatggtcctggtatctgtgtgaggaaacgcgttatgccgttattgtagccatagttgctatacattcgcttctgggttgtcagcatacacttaagtgcgtaattgttgcagaagttgtctttctcctggactttgattccaggagctcaggtgttcaagtataattatgctatagggtttgagatttagttctctccactgacagttctctttggaacttcttaactactctgacctttttggtctccagacaaggtgtgtggctagccttgctccaaaaaattaacaacatatcaatgtttaccttctgtgctttaaagtttttattgtttggaacagtttaatgatgtcatgcttaaatggtaagtgtagtactacatactaatttctctatttaaagtagaggcaactccataaattatgagattgtattgtacaaatttgtgttgtcaaatacataccactgcttatataagatagaaataatgttataaatgctaattaagtccccagactaactggcagagacatttctaacataatgttactgacttctgatactaaaaaaaaaaaaaaccagaggggctgccatacagtagattcatagtagactcattgtagaactgcctcatagggtttccaaagagcacctggtggattcaaactgccaatcttttggttagctcttaaccactatgccaccaggatttcctctgatactaagcatacccaaaaaaccaaaccaaacccactgccctggagtcgattctgaaccccatagggtttccaaggccgtaaatctctgtggaagcagactgccacatctttctcccacagagcctctagtggtttccaaccaccaaccttttggttagcagtcagtcacttcagccactgtaccaccagggctcacaatactgactttaaattgaggcctgaggacagggcagtacaggacagagtaggaggaagagaagagctttctccctttgctagctactgatgtgtaaatgtcagtaaggctttagctttcttagagttaaacttgcgattttaaattaaaaagttttcaactctaaagaatcattggtagaatttcagccaatgtaatttaaacattgagggaaggaatatttttgccctgggctcagttgttcagttttacaaatccctaaattcaatttaacttctagtcagtgatggcttttaattatgtcttctttgcacatttgaatctacatattctctaaatgctaagctctacaaagttgaattgggatagttgctagttagaggagaaggacaagggtcacgatttttatgtgttgatatctttttttaagttggaaccagggactttctgtaagtagttcttttgttatggtgcaggggcgttgggagagggtgggtgtattctgtgttattttgcttttcctgaaaagattctcttctatatatttttatatcttatttaaatgttttctttttcttataggtttatggtaaatatgccagctcttgaacaaatgaatcagattttacacatcttgtttatattcttaccttttctctgggcactgggaaccctgcccccacctgacgcacttttcttatgggcaatggagcaggtcttagagtttggccttggaggttcacccatgtcaacccacctacggtaactttttaaatcatcgaagttacatgtagcttattcctaaaggacatctttcttttaaagcaaatccttttttcttcttttttctctgcaggttactagcaatgttcatggcttctgctggagcagctgtaacatcgtatttcattcccagcactgtcgctgtggttcttttcatgactggacttggcttcttacttagtcttaacctaagtgagatgggttttgtcttcaaacacagtgtgaccagacagagagttagaaccaaatctaaaactttacccaatggctcggaaacacagtttacgtggaaggaatgcgttttctacatcattatgttagttttggctctcttagaaactagtttgctgcatcactttgctgatttctcacagatttccagaagcaatcctcaggctattgttggctatattttgatgatattacttataatactatggatacttagagaaattcaaagtgtctatatcctgggaattttccgaaaccctttctatccaaaggatgtgcaaagtgtgactgttttcttagagaagcaaacaaggctcctgaagattggtgttgttagacggattttgctgactttaggtaggaagataaaatctgactttatattacaaaccatatctaggaagtatacaaaaatatggaattctcatatttgtgtggtattatactacatacaaggggccctggtagtgcaatggtcaagcactcagctgctaaccgaaaggctggtggttcaaacccaccagcagctccatgggagaaagatgtggcagcctgcttccgaaaagattacagccttagaaaccctatgtggcagttctcctttgtcgtataaggtggctatgagtaggaatagactcagtggcagtgggtttggtcttttgatttatactccatagaaatactgttcttttatgttttggtttttgttttattggtttcttaagttaattgcttaaatgtgttcataaaaaattcttatttttgccaaaataaaacataggaggaggggttattttgcattaattaaatttgtctcttttttgttttagtgtcaccttttgctatgattgcatttctttcgttggacagttccttacaaaggccccagtcagtggctgtctccattggattcacaagagcctttagaatggtaatcctaatatgtactgaatagtattttccagttgccaagtttaattttgattatgtttacgttaacagtttgcttagattatcaaattttatataatatggatatttgtgtactgcaggtatggcagaatacagaaaatgctttatcagagatagtcacagtatcagtagtgcactcattgatcttcagtaaagacttgtggtggaatagaagcctggatacaggaattagactcttactggtaaaccttttttttttttttaacaactttattgagatatgtcgcatataccataaaacttacccatttaaagtgtacagttcagtggtgtatgctcctagttttgcagtcatcatcactgtcacaatctaattttagaatattttcaacacccccaaaagaaacctcgtacacatttattgtcgttccccattcctgctctccatcccacccacgccccactccagtcacagcaaccactagtctactttctgtctctatggatttacctggtatgatatgtgatcttttatacctgaagtttttcacttatataatattttcaaggttcatccatgttttaacatgtatcagtccttaattttttctattgccaaataatattccattgtgtgaatataccacatttggtccatttattagttgatggatagttagatggtctgtacttctttactgttataaatagtgctgctgtgaacatttgtgtacaagtttttataagaacattaggttttcatttctcttgggtatgtagctggtagtggaatttctgggtcacatagtaaccgtatttaatactttgaaggaattttttgacatacagttgttggtaatattcccttaaacttttttttttttttttctgtaagactgatagtaatgtcccctctttctttcctgattttagtatttttttttttcatggtcagtctagctaaaggtttgtcaattttgttcatctcttcagagaaccagcttttgatttccttgactttctctactattttttgtttttctattttattaatttctactctaatctttatcatttccttccttctgcttgctttaggtttagtgtgctctgttttctagtttcctaagatggaaggctaggtcgttgatgtaagatctttcttctcttttaacataggcatatatagctgaacactgctttagctatagcttatgttttggtgtgttgtgtttttgttttcattcatctcaaagcatattctaattattcttatgatttcttttttgacccattggttatttaggaatatgttttttaatttctaaatatttgtgtatatctcaaattttttctgcagttgatttctaatttaattccattctggtagaaaaacatactttatatgatttttatgcatactttgtatgaccagtctgttgaggtttttgtcttatggcatgacttcattccttaatctttataaaatactctgtaaaataagcttaaaataaggatagtaatctccactgcagagggctgttggaagtagtaaatgaaatgacataaatcaaacacttctcatactagtagggctaaattaatctattgaaaaagcaactcactttagatgtaaaacataggaagaggagaaggagaaaaggtcagtgatagagtaggagactgggaaaagggagtgaaatgagaaaagagaacaaaaggggaaaaaatggaatagcttcatgatctaaggaatgacatactcatactagattttgaccaccactggctaaggatggcaatttttaatcatctaacaagatagtcaaactatggtcaaaccatttatgtgaaatgtccatactaggaaaatccatagagacagaatgtccaccggacattcctatttgaattccaagggcttccaggaatctaaaccattgttgccactggtagtttaagtaacagctgaggtgtaaaactggagaggttggaggtgtaagattcccatacctccggacaaaaagatctcagacccaaagccatcattcttcaccataagctgatttaaggtgcatcagaaatctcaaacaagctcaatggttcagttctaaactccagagaactcccctccacacataccaattaataaaatttctcgtttcacttgcagtgtaaacattttcattatcctttggaatgaataattctatctggacaacgtttaagctaagtaacagcacaaggaggcaatgtctgctttctgtcacatgttccttccctttgacaaaccgagcaattgatatatagcaacctggaggatgaaactttattgaatttgtttgttttgtttttcttttgctgtgaaatgggtgttttaatagcttattggttttttgttacaacaaaagtgctatcagttttgtcatctctaattctaccagaaatttagagataatcacagtttaacattttcgtgtatacctttttgttcatattcacgtgttcatttatcaacagaagtaggatcatacacactatacatgttattatgtaatatgtaacaacaaactgtgaacagcttttcaatcattcttactcttcagcattatatagtgattgcattataatccattgttcccgtatacataatctaattagctaccctacggatgttaaaataactgttacatatttactaaaagaggcaacgattatccttgtagctgaatcactatacatattcatcatcatttctttaggataaattcctagaagtaaaattgctgagccaagagttaaggacatttttagggctcttgatccatgttgccacatggccctccagaaagattgttctattttatattctcaccagcagtattaagaagatgcccatttctctctaagggcactttattgttcacttctttgatttgaagcagttttaaaaagcagataaggaggaagtagttcagctccacacagtgcagccagtaaaccattgaatctcatttccccacatggtagcacaaaatgaaaacaaatttcaaaagatttaggtaaagccatgaatgattttcatgatgggaaagagcaatgcttggaggggtttgcagttaacattgaggtggccatccacgtttttgtactatacaaatcatttttttatgtatacaaacaatatacatactttgggggaagtaaataataatgtttgtatacatgtttatgtatacaaacaatacacatactttggggaagtaaataataattctagcagaagattgaagccagatatgtcaatataaattttggaagcaagtaattttttttcacaactaattatacaatgcaggagcaaaaatgtaaagtaatttataacattgaatggtttgattagggaaaaagagttttcagatctcctaggagagaatgctttgtgttttgaaaatggggaaacccaatgaaaagagaaatttggttagaactatctgagaaaccctggtgtcgtagtggttaagtgctgtggctgctaacgaaaaggtcggcagttcgaatccgccaggtgctccttggaaactctatgggcaattctgctctgtcctatatggttgctatgagtcggaatcgactcgacagcaacaggttttttaatctgtgatgtcagtgcaggagaccctgaataaccttacttttagttgttcataaatccatgtttccttgaggtagaaaaattctagagaaagttaacctcggaagaaagacctggcagtctacttcccaaaaaatcagccattgaaaaccctctggagcacagttctactctgacatatatggactcgccatgagtgagaatcaactcgacagcaactggtgagtataaaacacaccccacatttcaaagacttagtataaaaggaagaatataaaatatcttgttaatacttgttaatattgatgacaagttgaaataatattttggatttgttaaatagattattaaagttttaaaaaaaagttacttagaggtaattcatttgttagattgtaaatttttttttttttaattccaaactaaaatttataatcatgaaaataagcttcctcttaaagaaggtttttcaattcttttaggcccaaggtagaaatttctttgtctttactagttagaggaaactgaacattttgacttaacagcatcagaatgtaaagtaagctttttggtcatcacataacatatgaaaagaaaatgtccctgatcagtttggaaaaacttggtggcatagtggttaagagttcggctgctatccaaaaggttggcagttcagatccaccaggcgctccttggaaaccctgtggggcagttcgactctgtcctatagggtcgctacgagtccaaattgactggaccgcagtggattttgatcaatttagtcctgtttctatcctgggagctggggataacaatgggatgagtgtatatattttgcatgtgtcttgttgttgttgttaggtgccatccagtttgttccgacttagagtgaccctgtgtgcaatagaacaaaacactgcccagtcctgctctttccttacaatcgttatgcttgagcccattgttgcaactactgtgtcagtccatctcgataagtgtcttcttctttttcgctctaccaaacgtgatgtcttcctccagggactgatccttcctgataacatgtccaaagtatgtgagataagtcttgtcatcctcacttctaagaagcataagcctgtacttcttccaagacagatttgtccgttcttttgacagtccatggtatattcaatattctgcaccagtaccacaattcaaaggcatcagttcttcttcagtcttccttatccatcatccaacgtttgcatgcatatgaggcgattgaaaacgccatggcttgggtcaggtgtaccttagtcttcaaggtgacatctttgcttttcaacactttaaagagttcttttgcagcagatttacccaatgcaatgtgtgttttgatttcttgactgctgcttccttgggtgttgattgtgggtccaagtaaaatggaatccatggtccagttgtaaggatttttgttttctttatgttgaggtgtaatccgtactgaaggctgtggtttttgatcttcatcagtaagggcttcaagtcctcttcacgttcagcaagcaaggttgtgtcatctggacaacgcagattgttcatgagtcttcctccaatcctgatgccacattcttcttcatataggccggcttctcagattatttgctctgtatacagattgaataggtatggtgaaagaatacagctctgatgcacacctttcctgactttaaaccatgcagtattcccttgttctattcgaacagctgcctcctgatctacttacaggttcctcacgagcacaattaagtgttctagaattcccattcttctcaatgttattcatggtttgttatgatccacaccgtcaaatgcctttgcatagtcaataaaacactggtaaacatctttctggtattctctgctttcagccatgatctgtttgacatcagcagtgatatccctggttccacatcctcttctgaacctggcttgaatttctggcagtcccatgtagatacactgctgcagctgcttttgaatgtcttcagcaaaattttacttgcatgtaatactaatgacatagtttgatcatttccacattctcttggatcgcctttcttgggaattggcataaatatggatctcttccagtcatttggccaggtagctgtcttccaagtttcttggcatagataagtgagtacttacagcattgcatccatttgttgaaatatctcaattgttacactgtcaattcctggaacttgtttttcaccaatgccttcagtgcagcttggacctcatccttaagtaccctttcctgatcatatactacctcctgaaatggttgaacgtcgaccagttctttttgatatagtgactctgtgtattaattccatcttctgttgatgcttcctgcgtcatttaatatttttcccatcgaatccttcagtattgcaactcaaggcttgaatattttcttcagttctttcagcttgagaaatgctgagcgtattcttcccttttggttttctaactccaggtctttgcacatctcattataatactttactttgcctttccaagccactgtttgaaatcttctgttcaacttctttacgtcatcatttcttcccttcgctttagctactcaatgttcaagaacaagtttcagaatctcttataacatccgttttgctccttcctttttgtctttttaacgacctcttgttttcttcatgtatgatgtccttgatgtcatcccacaactcgtctggtctttggtctttagtgttcaacgcatcaaatccattcttgagatagtttctaaattcaggtgggatatacttaaggtggtactttggctcttgtagacttgtactaattttcttcagtttcaccttgaacttgcatatgaacagttgatggtcttttccgcaatcggcccgtggccttggtctaactgatgatattgagctttccatggtctctttccccagatgtagtccatttggttcctgcgtattccatctggtgaggtctatgtatataaaaaaaaaaaagtcaccgtttatgttagtgaaaaaaggtatttgcaatgaagaagccactgatcttacagagttctatcatgtcacctccatcaccgaggccatattttccaactgccgatccttcttcgtttccaacttttgcattccaatcaccagtagttatcagtgcatccttattgcatgtttgatcaatttgagactgcagaaattggtaaaaagcttcaatttcctcatctttggccttagtgactggtgcataaatttgaataatagttgtattaactgatcttccttctgggcgcatggatgttatcctatcactgacagcgttgtgcttcaagatagatcttgaagtgttctttttgatggtgaatgcaacaccattcctcttcaagttgtcattcctggcatagtagaccatatgattgtccaattcaaaatggccaataccagtccatttcagctcaccagtgcctaggatatcaatgtttatgtgttccatttcatttttcacaatttccagttttcttagattcatacttcgtacacaagggacttagcagtttttaaaagctgaaaaggtaatggcttcttttttcagactgcattaaagtgtccccatcaaaatgtcatgaactcagtcaagatcactggacacagaatgatgaaacagcttccaaagtttatctgtacttttctcgagaaacctgttgcttaactacaacttcttgtctcataacttaaattttggtcaaccttaagatgcagataacactcttttctggttctctttagtgttactttttttttttcttaatgagatcccaaacttgaaaatacagtctcatttattgtgaggttggaaaagaattataacagaatttcatatgagagttatttcccccaaaaaagtattgggtcaagaatgaaattattattcgtcatttccttatgtagacttgaaaattcatgaaaagtctttaagaataaatacaaatcatttttacatctctgcaggttggtcttgcgcgtgatcgcctgattcagttcatctctaaactacagtttgctgtgactgtacttttggcatcgtggatggaaaaaaaacaacgtcgaaagtcagctgccactttatgtatattcaacattgtcttctctccgttcgtgttgctcttcatagttttttctacactactctcttctcccttacttcctctcttcacccttcctgtgtttttggttggatttccccgacctattcagagttggccaggagcagtgggcgctgcagcctgtgtgtgtgcagatacagtgtattactaccagatggtcccaagtttggctgctgcactgcagtctgcaatggcagctggaagtttaggtaagtaaatgggttgtgcttaaaaaattctaagtataaagtgccaaaaaaaaaaaaaattccctttttatccaactgtataatgggctataaaacatattccaatactttgatgcgtaggcagaaagactaaacgtgaaatagaaatatacctcctgcttcttaaggtaaaggtataaaataaagacactcagggaaattttcattaaggtgattttacaatttttaaaacgcatttttaaaaaaaattttttattgtgcttttagtgaaagttaacaaatcaagtcagtctctcatacaaaaatttatgtacaccttgttatctactcctagttgccctccccctaatgagacagcacagtccttctttccaccctgtactccccgtgtcctttcagccagtttctgtccccctctgctttctcatctcccctccagacaggagctgcccacagtctcatatgtctacttgagccaagaagctcactcctcacaagtatcattttctatcttatagtccagtccagtgctgtctgaagagttggctttgggaatgattccatttctgggctaacagaaggtctagggaccatgtcctccagggtccttctattctcagaaggaccctggagaatttgaggtctgcatcccactgttctcctgctccatcagaaattctctgttgtgttccctgtcagggcagtcattggttgtagccaggcaccatccagttcttctggtctcagactgacatagtctctgatttatgtggccctttctgtttcttgggctcataattaccttgtgtctttggtgttcttcattctcctttgctccaggtgggttgagacaaattgatgcatcttagatggccacttgctagcatttaagactccagacgctactcaccaaagtggggtgcagaatgttttcttaatagattttattatgccagttgacttagatgtaaaacacatttttttttaacgaaaccaggtgacagtcctaccattaaaacatgaaacaactttttcccccaaatttccgtgaatttattataacgagtttatgttaagtggatgtaaagcttagagccatagagagtgaaaactagctttacataatatcggattcaagaaggcaagggaactggtttatattttactagttattgtgtagagactaaagccgtaagctaactgcacattcagctacagtatattgtacttctcaacattggttttagaaaggtgcaaggtgatggcagtagtgtataatcgcctaccatatgcttgttttagaaatgacagatgactttctgaaaaactgattccaggtagagtagcaattttagatcagaatgttagtgaagtgctcacccagggtgaacttttattattgtttattattatgttagataatttaggaaaaaattatctttgtagtatagattttttatgaataatcattttcttatagaaaatattctatgtttttaacacttttatccagttccagttaattttcatcatataatgctttgctacttttaaaaacacctgtggggttaaactcatatctgaaataagaagtattttagtaatagtacagaaattatattttattatcaaatcaattacacttagccaagatgcgagttacaaagtacttcctggggggaaaaaataatgagatatcatttcacacacatctgactggcaaaagttaaaaagtctgacactaccaagtattggctaggagaaaagacctggcagtctgctctcataaggattacaacctaggaaaccctctggggcaattctatcgtgtcccatggggtcactgtgagtcagaagctacttgacagcacacaacaacaacaatatccagtgagtggtctcactgggattgtgtgagtcagagttgagtggatggcaatgggttaacacacaatgaatagttgctatccttgacctactgggagggttgaaggaacagtgaatcagttccaaatgtgtcgtcaatttcaaagattcacatgacaaaataaaacaatcttgaaaaatgattccctttttttctcatttgttttaggtctcctcttaccggggtctcattacttgggccgttttcaggatcgtttaatatggataatgattctagaacgaggctatacttactgctgtattaacattaaggtcaatgttcatttgaaacctctttagtgttttttatagtacatgcgtaaaattttatttgttgtgtatgtatcaaacagttaatagctcaatccaaagaagaatacctttttaattacctatgaaaacacctagggattccagtatgtacgtattgataggcagactagtattgattgtataatagagcaaagtgataaaacatacctgctaataatagagcatagtaacaaaacataactgctaccctttcttccagccctgtccttttttgtctctcactagctaagcataagcatctcaaaaatgtgacttagttaaataatcattttaacatataaatattctcaataaaaccctacctactacatcacatttctcttcttttagagcaaaatgccttagtatagttgcttataatcaaatctccaatttcattccttccattctctcttcagctttagatttttgaccccattactccaccaaaactggtcttgtcaaagtctgcagtgactgtcacattgttgagtccaatgctgaaccctcagacctatctaatttgacctgtcagcagcatttgacacagtttatcccttccttctcttcacttgttttacacatcactccttgtcagtttcctctgatgatgccatctcttttcctcaacctctttacatcagagttcctcagagcccagtccttggtgacaactctatccttctggttgctcaggccaaaaacactggagtaatatttgattccttttttacttctctacccacatcgagaaatcctgttaactccatctttaaaccatatcctgtatcccacttcttctcactaccctagatccagccaccttctcccttgcctggataattgcaatggccttctaattggtcccctgtttctctgtccccttacagtctattctcaacacaatacccagagtgatctttttaaaaaatctaacttagatcatgtcatttctgtgctcaaaacccggtagtagatctctgtttcattcagagtaaaagcagtgtcctaaatggtcaggttccctgtcccctctttggcctcatctactattttaaccctctcactcaactccagcctactggctgttccctctgcctagaccactcttccttcagacagccaaatggctaactccctcattacgttcaagcctgtgctcaaatgtaacctcagtgaggtctactatggccattctatttaaaattgtgcccccacctccatccttgcactcccaatcccctttgctttaccttttttttttttaattgtcatagcattgataccttccaacatactatgtaatttacttattaattagttttattattgattttccatcttcccccattctctaatgtaaatgtcacaggggtagcactctttgttttgtttggggatatatcctgagcacctggtatttactgggcccttaataaatatttgaacgaacgaattttttgtcttagcacagattggataaaattggtgactaaagcagtttctttagaccattgattctcatagaacagtcctcaaaccagcagtattaatgtcacctgggaacttgttagaaagggaatttcttgggccctactctggacctactaaatcaaaactctgggggtggggccaagcaatctatgttttaacaagtcccccaggtgattctgactcagctaaggtttgagaatcactgttctagtctaacgtgtacaaatagaagaaggcataaaatcatgcaaaatactgaggatgttttattgcttaattttgttcttttaaaaaatggtgtcattttataatatctaaaacatgggttcttttattgattttctgtgtgctgtagcatacgtgggataaaggcatactttttggtgtaagtctgttttgttttgttttttggcaaaaactggcttagctatgccatttagtaacattaatataatgctttaaagtttacaaagcacttttattacttacttagtttaatcttcacaaccctaagtactagaattgtttttcttcaaaagagagggaaaaggaatctcagagagtaagtgacctactcaagattacatagccagcacctggtggagccataacttaaaaatgtgttctgatatcacatcccatattctttcccctggatcataacacaatctgacagcattaccttttattgatggcactgatagttttgtaaaaatatataaataaataacagtaatgatagtaaacagtgacctggtatgtcctcttcaagtgattgcttctagggaagtaatcaaaatgtgttcagaattcatagaggagcatactcataaattcattcactcagcatatatttcttgcagacagctatgtgccagggattggcttaggcactggagatattagtagttatcaaaagagacttgctttacaaagtttacattgtaattggaggagaaaaacaataatcagataaatctgttattattttatcatcacagtaaaaacctggaacaggagaatggttaaatagattctggtgcatccatacaatagaataatgctctcaatctcatataaaattgggtggaaaggatacaaaactgctattcagactgtataatttcaattttgcttttttccaaaaaacatttatagttctaaaaagtttttagtaagtaattcagcttcactatagagtttataatcagtaaagttgttccgccaatttatagtggactttctataataacttttaaaataatggtagtattaattttagtatctgtattcagcaccaaaggtgttaagtgccactaagtttgaattaaggtgtataactcttgagttaaaagacacttttgcattttccattatttttattgtaagaatccatgggcatttatgaaactagttgcttttttctgtactaaatgatcatgaactcaagtacattttatttcctctttaggggttagaattgcaagagacatcctgtcacactgctgaggctcgaagagttgatgaagtttttgaaggtgcctttgagcaagaagaatatgcaagagtttgttcccttaatgagcactttggaaatatcttgacaccctgtacagttttgcctgtgaaactatattctgatgccaggaatgtcctatctggcataattgattctcatgaaaacttgaaagaatttaaagatgaccttgttaaagtacttgtgtggatacttgttcattactgctccaaaaggtccagtgtgcaggagaatgttcacaaaactgaaaataaagggaaggaacctgtaataataccacccactttgaatccttcaccacaaccccactgcccagaagacatggatagtttaaattcagaaacttttgatgactggtctgatgataatatttttgatgatgagctaaccatcaagaaaggaaaagaagaaaaagatcaattgaaagttttgccagatacaaatttgtctcttccaggatcagtagaactagggaaggttggtgatccaggcaaacttcctgaaaacagtctttatcaaacagttatattgggataccctgctgttgacaaaggaaaacaagacatggcatatatccctctaatggagtttagttgttcacattctcacttgttaagctttcctaaagagtggaggtctaactgtttgcctgattccaaaatgaaggagatgagctcactatttccagaagactggtaccagtttgttttaaggcagttggaatctttttattcagaagaaaaggcctcagatgtactggaagaaattgcaaaggataaagttttaaaagacttttatgttcatgtagtaatgacttgttattttagtttatttggaacagacaatatggctcctagtccaggtcacatactgagagtttacaatggcgttttgccttggtctgttgccttggattggcttgtggaaaaaccagaactattccagctagcactgaaagcgttcaggtaattcactttgattatttaaaagtgttaacattggcaggaaaatgttggtttttttagttcaccagaagatgacttttattgctaattgaaaaaaacaaattgtcctaaaattggggaaaaaatgcttaatatgtattacggttatttccagagtacacttttagtttgtacttcctttggttttgtttatgtagaagacctgtttttcatatggcatattggatttgttcgctttaactgcatcattcctccctccctgatcttttcatctgaaatatttgcaattgcagatcaacatcttcaaaatattaatataacaaaatctattccatctatgacaatgataaaaagattctaaaatttttggttctcttttttttttttttaggtatactctgaaactaatgattgataaggcaagtttaggtccaatagaagactttaaagagctgaccaactgccttgaagaatatgaaagtgactggtacattggtttggtatctgatgaaaagtggaaggaagcagttttacaagaaaagccatacttattttctctggggtatgatcctaatatggtaagttgagaaatgtgtttttaaacatttttttatatattaaatttaaaggatggaaatcagttataaagtatttcaacgaagtgatagagatataacattctagcagtatatatattaattacaattttaaggcatttgtagtgatgactttgtgcccaatatagtccaaccctagaatggctgattaaatcacttttgccaacttaataggagccaattaaaaatattgtatagccattgtacaacaactgacctataagttagccaagtaaccagaatttgctatggcatatttacttaaatggattgtattcctgtgcccagtttaagtgtatgaattatcactttggatttgactcctggaagagtaatttatatatggcaaagtatttcactgacatctgtattttaaagcaaaccttatttgaagcaaatctgacctgggaaaattcagagagactcagaatagagcataaattttctatgatttggttcttgttcttatcacatttaaaatgtcatccagtgtgcacaatacacaagtttcaatgttaagagtctagtgtgggttccacttctggcacggcagcatgggaaattcagcacacacacttcccagtgaaactgatgaaaatgatttaaaagtaactgtttaaaacctcaagtggtcctaagggtataccacaaatgaagtaacatttaataaagaaaatgtacaaaagcttggtaacagcagcaagagacttcgatatttgaattaagacccactctctacccaccctacccacccggctccagctgagcaaaacggaactccacttagactatacagcccagaacacagggctccttctcactccagctccagttgaaggactgttttcccaggaaaggcaggacttcagcatttctcatcctgcctccagctacctattgctggtgcctagcccattcatgggacagaggttctaccttgggtgtagcaccactgagagcactatccttgatcacccttaccctggctggcaaggcagagggttccattcctggaagacctaaggctacttccccacctccaccaagcattcatctcctaatggcagggtgttactcagagaagcatgaaaatgttgtaaaattgactatggtaatggttgcacatacctgtgaatatactaaaaaacattgaactgtatactttaagtgggtaaattataaggtacgtgaattatatctcattaaagcttttttttttttttttttaaagctgattgcatgatggtccactgactagtatatatggtttatgtatcactgaggccagacggaatgagggaatagaaaaaggaaaggaagagaagtagccggcattatgctgttctggtcattaaatggaattgcttccagggaatttttcttctcatacttactcagataactagggaaataaaagtgattcttgattctaaagacaagcaacttgtgtgtacattttaatacaccactttctcttttttgatcttgggagaaagtttgcagtgagatttttttcccaaaaatgtataaataaagtatgaaaactgaatgtaatttctttttctctccttcttcctcccccattttttttttttttttttttttaactcttaagggagtttatactggaagagtacttacccttcaagatctattgatccaagttgggaagttgaatgctgaggctgttagaggacagtgggccaatctttcatgggaattgctgtatgccacaaatgatgatgaagaacgttacagtatacaagctcatccactacttttaagaaatcttacagtacaagcagctgatcctcccctgggatatccaatttattcttcaaagcctctccatatacatttgtattag

SEQ ID NO: 15 - DNA, 20604 bp, synthetic construct
  source 1..20604: mol_type = other DNA
atggcatccagtactgagcgtcctactgaagatgaacaggtttccttgggcatcgatgatctccagatttcattgcaagctgaacaagaacatactcagaagaagacttttacctgttggataaactcacagttggcaaagcacccgtgcccctcagttgtatcagacctgttcacagacattaagaaggggcatgtcctcctggacctgttagaagtactttcaggacaacagttgcctcgagataaaggatctaatacattccagtgtagaatcaacatagaacatgctctgacattcctaaaaaaccgatcaatcaagctaataaatattcatgttactgatattatagacggaaacccatccattattcttggcctaatttggacaattatactgcactttcatattgaggagcttgcccagactctttcttgcaattacaatcaaccctccctggattgtgtgagtgaggttgattcatctcctacctcaagtcctccagctaagaaatgctccaaagcccaagcaagatggcagatctctgcaaagaaggctcttctcttatgggctcaggaacagtgtgccgcgtatgaatctgtcagtgttacagattttaagtcaagctggagaaatggaatggcttttttagccatcattcatgccttgcgaccagacttaattgatttgaacagtgtgaagcatagatccaacagagacaatctggaagaggccttcagaattgcagaacgagaactaaaaatccccaaattgctggaacctgaagacgtggatgttactaatcctgatgaaaagtcaattatgacctatgtggcacagtttctcaagtattcaaaggatgtacctgggactggagaggagactcagggaaaggtgaaagatgctggagtttggctaactttacaggaggaaaagctacagaaggcgctaaaggattcagaaaatgagtcctactttaaaatgtatgaaagcctactgtcctttttgaaatcattcaatgaagaaaaaaagccctttttggacatcctgttgatgcagaagaacctggatgagctgagtgaagatcagctacagttgagaagagcctgggatggcctcaaccaccagattaatgcgtggaaagcaaagctgaaccatgccttgccctcacccctccatcagattgaagcttggctccaggagatagagaatctcctagatgaagatttgccggcctccttggattacactgaagccaggactcaaactcaagagaaaatcactttattcaagagtctggtggataaatctgactgtcatttgaatactctcttggcatttgaaaatagagatgaaaagcatttgctactggtaccacctagcaaactggaggaaatgaagagacgaatcaacaacattttagggaaaaaatgcattccctgtctagaaattcattaccctatgtgcccagttcttggtttactagatgaaatgagatcaaaattcgatgtttggaacatcaaatatgggagcaaagaatctgtggaattactgctggaagactggcataaatttattgaagaaaaagagttcctagctcaacttgaagcttcttttcaaaaatgtgaagaaatgaatcagaatttggctggagactatcagactattagtaagcaatatatgacggtggattataatatttgtatatatagaaaatatatatatactgtgaagtccactctagaaaaagttctggcatgttggactacttacatggaacaccttcgcttactaaaggcttgttttgaggatacaaagaaggaaaaagttaaagaggttccctttgagacactatcccaatggaatctagagcataccactttaaatgaagtgggagatttcttaattgaggtcagtgatgatgaagttggatcatctatttctaaagaactgagaagactgaataaaagatggagaaagtttgttacaaaaactccgcttgaaatgaatctgccgcttatgaaaaaacagagtcagcccgttcttgacactgctggaaatattcagctaactaaagaagaaaaatcaactattggtttttcaacagacatgtcaataaaacctcctgaaaatcacaatccagatttgaaggctggagaagaacatgaaaaagaaaatgaagaattaacagaaaaactgaaactggttgaagaggttgaaaaactcgttggacaagtgggaatctgggaggcagaaaccaaatctgttttgggtcttgtgagacatcaaaatgatgtagatacatcagtagaagaatctttgcagcatcttattgccaaaggatctatgtatgaagaacttatggctagaactgaagatactttgcaaatggatgtacaaaatatttcaagccaggagtcccttcaacacattctcacagttgggcttcaggcaaaaattcaagaagctaaagagaaaatccagattaatataatacaactagttgcagtgctgaagaacccaactgatgtctcaccagaattggatgtcaggctgaaggtggaagaattgcagaaggagcttgaatcgtacattactagggctgagcagttacttgcacagagagagagccacagcggactaatttcaaaatataaggaagcactgataatttttaattctgtaagtcttgcccagtatttgaaagctgttgaagaactgaaaaataatgtaactgaggatgtaaagctgtctttggaagaaaggagtagagatgtctgtgcaaagtgggagtctcttcatcatgaactgtctttatacattcaacaactaaaaatagacattgaaaaaggaaaacttactgagaatatttcaaaacttgaaaaacaaataaataaagaaaagaaactaattcgtagaggaaagaccaagggtctcatcaaggaacatgaggcttgcttttctgaggaaggcaatctctaccagcttgatcaccacatagaagtcctgagggagctatgtgaagaactgacttcacagaagagtcaacaagaaatgaagagagtacttaaagattatgaacaaaggatagaaagacttaggaaatctgcttccgagattcatatgaccctgcaacccatggcgggaggcatgtctaaaaaaaaggggactgtgaacacatctgagaatggaggaagagatgtccacagtgaggtgccatttgcaaaatcagataatcagccatcaactgaaaaggcaacggaaccagttaagaattttagcctagaatcagagttagagcctcaacatgaagaagacatggagaagaatgaaaaggattacagtgcatctataaatagtttactagagaggtatgatacacacagagagattcttgaactacacctgcaaaacaacaaatgcaggattacttctgatttctctagtgacaaagaaatgagtagtgattgtcttcaggatacactgacagatttacaggtcttaaaaaatgaaactgatgcttactggaaagaatttgaaatcacttcactgaagttagaaaatcttgtgagtgacatacagaagccagttatagctaagacaagagacatattaaagggaaaagaaagagagcttcagatgaccctcagtgccagaatggagtctatggcgactgcattgcagattgtgttgccggtggagaaggcatcacttgttctctgtaactcggacctacttctccatgagatacccattcaggaatttcacctgactgatgctggtagcatttatcaaaacctgaagaatatccaagattccatagcaaaacagattgaaatatgtgacaatttggaaaagtcaggcaattttgccctgaaggaattacacccatttgacctacatgcaactcaaagtattatactgaaatgcaaagcacaacttgaagaaatgaaccacaaggttcataggagtgaagggacccttaaaaatctggaagattttttggcttctctaagaacagctgaactgtctattgagcctatgacagatcttttagcctcagatacacaggtgttaccagaaaatacttcgacaatagaaaacgaagagggaaaaattcatctgatgaaagacaaggccagacgtttggataaacatttgaagatgcttgatataagctttaaagatgctgaatggggtgaagatagctcctgtgaaaaacttattgatgttttgtcagcaaagttcggtgtctatgaggaacccactgaggaaaacaaattactagagatttgcgttttgaaaaataatgaactccttaaaaatattcaggatgtgcagaatcaaattagtaaaatcggtcttaaggatccgagcattccagccgtaaagcaaaggaaaaaatcactgatcagagtggataaggatctagatgaatatgaagaagagaagaaacacttgcaagaaatggctaattctcttccacaattcaaagatggccgagaaaaaactctgaaccagcagtgccaagatacagtactcttgtgggagaatacaaaagcttcggttgctgaatgccttgaacagtgtgaaagagttttggaactcttaaaacagtatcagaatttcaaaaatgtcttaacaactttgattcaaaaagaagagaatgtcatctcacttcaggcttcgtacatgggaaaggagaacctgaagaagagaataacagagattgaaattgtcaaagaggaatttaatgaacatttagaagatgtagacaagataaaccagatctgcaaaaatctgcaattccacctaaataaaatgagaacctttgaagagccgccttttgagaaagaggctaatgttattgtggatagatggcttgatataaatgagaagacagaagactactatgaaaatcttggccgagctctggctttgtgggacaaactttttactttaaaagatgtcattgatgaatggattcaaaaggtccatcaaagattggaattacatgcactgacagaagtggaaagagaagggctgaaggaagagttatgggtccaagaacaaaaacttccagaattttttgcaagagtagctgaaatacaatttctacttcaaaccagtgaagtacctcttgaattgcaggtcatggagtcttcgattttgaacaaaatggagcatgtaaaaatgggtttgacaggtgaatccaaccgctgcacactcagtggtaacacagatgagctaagagaagatctcgaccaggcgaaaacccagattggaatgaccgaatccctcttaaatgccctttctccttcagacagcttggaaatctttactaaactagaggagatacaacagcaaattctgcagcaaaaacacagtatgatattacttgagaatcaaataggctgtatgactccggaactctctgaattaaagaagcaatatgaaagtgtcagtgatttatttaataccaaaaaaagtgttttgcaagatcacttttctaatttattgaatgatcagtgcaagaacttcaatgactggttcagcaacattaaaatgaaccttaaggaatgttttgattcatcagaaaccagaaagaatgtggaacaaaagctacaaaaactttctgatttcctgactcttgaagaaagagacagtaaaatacagcaggtaggaactgtactgaatcaggtgaagaagcatctacccaaagcgaatgttaaagagcttagcagttggattacgaatcaagaatttgagttagaaaatatggagtccatatgccaggcacaggcaaaggagcttgatgactgcttacagcagctacagagactccaggagaaccacagaaacctaagtagttggctgactaatcaagaaaagaaatggaaagaaatgaaagagtcaagagagaaagctgagttgttttgccaagccttagatagaaagagggaacaatttgaatctctggcccagctgaacaactctttgaaggaatatgggcttactgaagaagaaataatagctgaatcaacacatttgattgataaatatcagacattattgagacaattatgtgaaattgaggaagaagaaaagttacttcctaccaaggaccagagctttaatgatcttgctgatgatgtaattcactggataacagagattaaagagtcccttatggttttgaattcacctgaagtcaaaatgccacttgaagaacgaatcaaaaaaataaaggaaatcattttactaaagcctgaaggggacgctaaaatacagaccatcacaaagcaggctgagagcggcaagcctcccatggttcagaagactcttgatatcaggaatgagtgggacaacacactccatttagccaacaagtatctaagccatcaagaaaagcttttgctggaaggagagaagtatttgcaaagcaaggaggatctgaggctcatccttacagacctaaagaagaaacaagaagcaggccttgctctgcaaaatggtttgcaggagaagaaatctcagttaaaaaaatatgaaaaattcctccagaaagcacaggatttgacatccttgctaaagggatcaaaatctgaaggaaattacctcttggaatgtactaaaaatcccaacttaagtgaagatccttggctggaaataaagcagctacacgaaagtcttcttcaacaactacaggattctgtgcaaaagttggaaggtcatgttcaagagcacgacacgtaccaggtttgtgtcacagacctgaatgccacattggacaatttctgcaaagaacttgacagtttttctgataagcctgtggatcaagtagcagttgaggaaaaattgaagaaactgcaggaactagagaataaactcagtttacaagatggtacattagagaagattttagctttagcagaatccgtcaagcaaaatacatcttcagtgggacagaagattattaaggaccatataacatcacttaagtgtaaacaaaaagatctggtaaacggacttgaatctgctaagcaggagacggagaattgtctcaatagcatcctcaaatcaaaatactcgacagaaaagaaagaagagtttactctgccaggtggagagaagcaggtcacttgtgatatgctggagtccactcagaacttggctgccgtggaaaagttggaggaagttggggaaataaacaagaattcagctgtggaaatggttttgtcaaaacaactttctctccgtctcgaagacagcatgaagaacgctgaagatgagcagaaagtcaatgagctgcaaaatcaacctttagaattagatattatgttaagaaatgaacaattaaaagagatagagaaattatatacccagttggaagcaaagaaagcagccattcagccactggagcaaactgaacatctcaaccaaatagaagcaagtgctttggttccccaaaatacaagatattcagtgcacaagttggaccatctgcttcaggtgctcactaccttgaagaaaaataaagaaagccaatattgtctccttaaagattttcaggaacactttgctgcagttgaatcttcaatgaaagcattgttggcagaaaaggaaagcctaaaagtgggagcactggacattgcaacctatctggataaaattaaaaacttcctggcatcaatagaaaaagaaaaggattctttatgcaaactgagaatcaagtgggagaatgtatcaaaccctctgactgacatggataagaagctgttggaaagccagattaagcagcttgagcatggttgggaacaagcggaacaactgattcagaagaagtatgctcaacaagtagtggagtatgatgaatttaacctccttatgagtaagatccaggacattgagatttctttgcagcaacagcagcaatgtctgcagttcaggctgaggtctccggaacaacaggaagggaaccaaagcttggtttccctggccactgaactcgaggctatcaagcatagattttttcttttaaagggaagagctgaccttcagatgaagaggatttggggggaaaaagagaagaagactttggaagatgtaatcagtaatttgcagaagcaactggacgctttggagccattaaacctagaggtgaaaaatcagatcaagaagtgtgaaataaagaatgagatgaaagagactattttatgggccaagaatctgttgggtgaattcattcacactgtttcccttctcccagatgacattctttcccagataagaaggtgtaaggtgatgcaagatggcattctggagaagcagccagtgctggaatctttggcggaagaggtcaaaggtaatgttactcacctgtcagcagatgaagccaatgatttaaataacctcctacaggatttgcagaatcaacaccaaatgctaattttagaatctgctcagaggtcacagcaattagaatttaaactggaagaaaagagcaaatttttcacagcaatggagaaggttcaactttcccttcaaggtaacgaaacattgataattcccaagttggaaacaacccccacagaatccgaacttggaaatcagcttgtcactttgaagacctctcaagaagaattgcaagaaacggaaagtgtaatctcaacgtatcttcaggaactagcaaacttctctaaggatgtaagtgtgtttgaaaagttatttctgactgatcaattgaaaaatcttaagactagggccaacagaacccaaagacttattcagaataaaagtgatgaagtagagcacaagataaatttttacaaagaatttcatgataaaatatctaggctccagaaggaggttgacaatatacagcacagtgaactgctgttaaatcaagaaataaatcaagatgttaaagaggagttttgtaattttaaagatagactaactgttattcaatctagcatcttgcaaatattaaaactgaaagaagtgtttgactatataggattaaactgggattgtgcacagcttgaccaattgcaaacccaagtatttgaaaaacaaaaggaaattgaggaaaaaattaagcagttggactcatttgttgcagaacatggcaaataccaagcatctctacgtaaaatgagggccatggatgcaaaaattaaagaaaaggctgaagcagtactgaaaacttttagtacttcaccagaaagtagtctgctcagtgcccaaattttgaatcagaaaatcgagaaagccatgtgtttgtatcatgaaataataaagaaattaattgaaaataaggcctttgatgagtcattcaaagagaaagaaatactacaaataaagcagtatacagaagaaaatgataagttacaccaagttctccaaaacttggtactagaattgcaaccgaaagaaatggatgaaaagaattttcaggacaagctggaaaattctttgcatgttttaaatcagataaaatctcagttacagcagcctttacttataaatttggaaattaaacatattcaaaatgaaaaagataattgtgaagcgtttcaagaacaaatccaggcggaagtttttagcattaaagctgtgactgtcattggtaagcaaagtgaaaaagaacacgcttcagaagctagtgaagtggagacaaaattacgtgactttgaagatcttcaaacacagcttaatgcaagcattgttttgcacacaaatgccttgaatgatgcttatgaaaatatgacacgctataatgaagcagtcaccagggcattggggatcaccactgccctggaagccgtccttgcatcccacagagtagatcttgataatccagaagagtcactagagatgcctcgttggaaacaagaggaattcgaatcgacaatagcggacatccgggacctcagtgagaaattgggagctatatccaaccctgaaaccagactacgacttgagtatactttacaggagttaagttctaaggattcaaccatgagggaggcagccagaataggggaagctgagatggaaaggtgtctcgaggattacaaatgctatagcaaaattaaagagaaaatttgcactaatttcagcgaagtggagaaagttctcgggcagtccatgtcccagttgccactgtcttacaaagaagctttagagcactcagaacagagcaaggctttggtatcaaatcttctatcaactaaagaagagttaatgaaactacggcaggtcctcagtcgcttgagacctctgtgcacagaaaaggatggcatgtgtttgctcggaactgtgtctgccctgtgggagaagtggttacgtttgctggaagctgctaaggaatgggagacgtggtgtgaagagctaaggcgggaatggaaatttgtcagtgaagaaattgaaagagaagcaattatcttagataatcttcaagaagaactgcctgaaatttccaaaacaaaagaagcagccaccacagaggagctctctgagttgctagactgcctatgccaatatgaagagaatgtggagaagcagcagctgttattaaccctactttttcagcgcataaaaagtatccagaacgttcctgaagacttaagtcctatggaaactgttccagcatttcaagagattgcatctatgaaagaacggtgtatccagctttttcagaaagttcaaaaaaataaggagttggtacagactgaaatccaaggaagacattctgtcaaaaaagaaataatggctttgaagaatttatttcaacggacttcctttcaagttatggaattacaggatcacccagaaaagacagaacagttgcaggagcttcaaagcattctgaagaaagagaagctaacttttgaggatattatggaaaaactgcgaatcaagtattctgaaatgtataccatagtccctgcagagattgaatcccagatggaagaatgccgaaaagctttagaagacgtagaggagaagattagcaacgaagtcttgaaaagctcaccgtcatatgcaatgagtcaaaaaatagaggaaattaatggtgggcttcataatgttgaaaagatgttacagcagaaaagcaaaaacattgagaaagctcaagaaattcaaaagaaaatgtgggatgagctagatctctggcattctaagctaaatgaactggattctgaagttcaggacattgttgaacaggacccaggacaggcccaagagtggatggataatctgatgatccccttccagcagtatcagcaagtatcacagagagcggagactagaacctcacagttaaataaggccacaattaagatggaggaatataatgaccttttgaagagcactgaagcttggatagaaaataccagtcgtttgcttgccaatcatgcagactatgactcttcaaggacaccaagtcagcatgctgtcgccctgcagatggctttggaagattcagaacagaagtacaatcttttatattcagttttctcagatctagaagacttgtcaataatttttgaaacagatgacttagcacagtcggtccagcagttaagtagtcaagtaacagcgttacaacaaaaaataatggaaagccttccacagattcagcgaatggctgatgatgtggttgctattgaaactgaagtaaaatcaatggagaaaagagttttaaaaatcaaagctatcctgttgtcaaaggaaatatttgatttttcacctgaagaacatcttaagcatggggaggttgtacttgaaaatatacgtcccatgaagaaaaccattgctgagatagtgtcttatcaagtaggactgaggtcaccccagacaggaattaaatctctgcctgtgtttcagcggacaaatcagcttttacaagatataaaattgttggaaaatgtggctcaagaagaaaatgagttattaaagatagtcataaaacagattaatgaatgcgatgaagaaatagaaaatttgaaagagatattaaataattattcagctgagttctctcttgaacgtatgtcaccagaccaagctgtcagcctgccacaagtacagggagaaatcagcaatatggaagcgcaaattctgagtctaaaccagaaaaaagaagacctgttggtgcacttgaaggctgcagtactaaaccttcaccagcatttgaagcaagaacatgaattagaaaaagaaatgccgtcggctgctgcacctgaagagggcggagtggctgagggggatgtttctgaatgggagttgagcagaacgggctccatgtctctcctgcccgcagtcatggaagagatggaggagagctccgtgaagagtgaaaatggagataaaaaagcagaagcgtcttccagttcttggtctttactccgggtgcatgacgaagacacggaggaagacagagcgtccttgtcttctagaaccatcattcagggtgccacacctcctatcgaggctgcagctctgggctttcctggcaagcaacgagcttttgaggccacggtggagaaaacaaggcccgagcctgctgaggtcctccatgtctgcaagacccaggtagctgagctagagcagtggctggaccaagccaacgtggcatttgagccggaaacattaaacgctggcatgcagcaggtggtggaacagcagctggtcgggtgccaggctatgctaacagagatcgagcacaaagtggcttctctgttggacagctgcaaagatcagggcctgggagatagtggagacactcaacaagaggctgaagcactttccttgaaactaaaaactgtgaaatgtaacttggaaaagttccagatgatgcttcaggagaaatatagtgaggatcagtattctaccattgtaaagaaaccttcaggacataaaaaaattctccaagataaccttcctgcatttgtatctattgtaactgaaaggccacagtttagcagacaaaaggatttccagcagcaacaggtcctggagttaaagccagtggagcagaaagatttaatcaaattcatagaatttaatgttacaaaaatgtggccccagtattcccaacaagataaagaaacaactcaggaatcatctttgagcgataaggcatctagcccccaagatgatgccccagatgcagccttttcagcccagggccaaagtggagataaatggcaatatttacagcatgaactatcatcaaaaatacagctaccttcatctcagcttgtggcgcctcaggttgtcacaaatatgagtattctacccagtgtaggtgtgtataactttagatacccaacaattgaagaactgcaaacatataccgtccaacttgaagacctacgtcaagaagcaaataatctccagacacaggaaaatgtgacagaagtaacatatataaatttggataaaaaattatttgaactactcctggctctcagtcagtgtcttagcaatgtggaggagatgctgcaaacccctgcactttgcaggggggatgttcacacccagcaggtacattatgaggctctggctcttgagttgaaaaagctttatttagctatgagtgacaagaagggtgagattttgaaagctatgacttgtcctggcaagaacaccaacttgttccttgaatgttttgataatctccaagtgtgcctggagcacacccaggctacagctgcctctcaaagcaagtccctgaaagctggcctcgactataattgcagttatcagaatgaagtaaagcaattatatgatcaacttactaagaataaaacatctttacaacagtctttaaatgaaattagtagccagcgtattgatgaacagttgcagaaaacagatgcatatacaatggaactacttaactccgagagccgagtggcaaaactaagagacgaaggggagcgacttcatttgccttacggtttactccaagaggtttacaaattagaggatgtacttgacagtatgtgggaggtcctaagatccaggtactcagaactcagccaccctttcatcactgagattcagcaggatgctttgttgcaaggcatggtggaactggtacatatcgggagggagaagcttgcccgtgaccacttacagcaaaccaaaagtaaagttgctttacaggctcagatacaggatcacaaggtttttttccagaagcttgttgctgacatgtttttgatccaaacatattccaacaaaatgatcccttcattattgcaaaagaaagaggcattttgggcagaacaagtcaaagaagtgaaattactagaggaaaagtcacatgagcatggcatgaagctgcagagtttgttgcagaaatgggaagactttgatgaaaactatgcatctcttgaaaaggaactggaaattcttatatctactttgccctctgtgagtttggtggaagagacagaggaaagattaatggaaagaatttcattttaccagcaaataaaaagaaacattgatgaaaagcatgcccggctataccagactctgaatgaaggcaaacagctggtggcttctgtgagctgtccacaagtggagggccagatttcaaaactggaagagcagtggttgtccctaaataaaaaaatcgaccatgaactacacagacttcaaacacttctcaagcatctcgtcagctacaacaaagattcagatgagttaaccgagtggttggaatcttctcagcaaactctgaattactggaaagaacagtccctcaatgtatctcaggacttagatacaataagaagcaacataaacaccttttttgactttttaaaggaagttgacaaaaagtcctccttgaagacagcagttgtaagtaccgggaaccaacttcttcacctgaaagaagctgatacagctacgctgagagcttctttggctcaatttgaacaaaaatggacaatgctcataactcaacttcccgatattcaagaaaaacttcaccagcttcagatggagaaattgccgtctcgtaaagcaatcacagaaatgattaggtggatgaccagtgtagagcatcaaactgcagatgaagactctgtgctctcaccaagttctgcatcgcaagttaaaaaccttcttcacaagtacaaggagtttagaatggaaatggactataaacaatggatagttgactttgttaaccagtcattactgcagttaagcacttgtgacgtagaaagtaagcgctatgaaagaacggaatttgcagagcatctgggagagatgaaccgccaatggcaccggttacatggaacactgaatagaaagatacaacatttcgaacaacttttggaaagcatcactgacaatgaaaacaaaatacagatcctgaacaactggatggaggtgcaagaagagagactgaaaactttacaaaaacctggaagtgtgatctcagtccagaagaccctcctggactgtcaggatatagaaaatcaacttgcaattaaatccaaagccctggatgagctgagacaaagttccctgactctggagagcggcacaatgccgttactagaagatacagcatctgcaattgacgatttatttcaaaagaggaacagtgttatcaatcaggtcaatcagctcaaaacctccatgcagtcagttttacaggagtggaaaatttatgataaactctttgatgaagtgaatatgatgacagtccgattctggtactgcctggaacacagcaagcctgtggttttgtcattggaggccttgagatgccaggtgcagacccttcaggctcttcaagatgaagctgagagcagtgaaggaagttgggagaaactccaagaggttattggtaaactgaaaaattcctgcccctcagttgctgaaataattgaagagaaatgccaagatacctatacaaggtggacccaagtcaaccaagccatctcagatgagttgcagaaggcccagagtctgctgcaactctggaaggcgtatggcagtgctcacgctgaagccacagcaaggctggagcagcaggaagccaagtatcaacagcttgcaagtatcagcatgtctggaaacaacttggcagaaatcctgaccccagccctgcacgacataaaggagctccagcatgatgtgcagaaaacaaaagaagcacttcttcaaaatgccgctcttctggagcgactcccaacctccgcagagtccagccccgacgtgctcctctctggtcaatcgcactccctccaaagggcttcttatttggagaagatgctgcttgtgaaaggaaatgaatttgagtttgttctctcacagtttaaggattttgaagaccacttggaatctctaaaaggtcttattatgcatgaagaagagaacttggataaactctaccagcaagaaaaggaagaaaactttgactcaatcctgaatcatgtgctggcactgacagcccagtcacctgatattgaacgtttgaatgaagtcagcctcaagctgccacttagtgacatagctgtaaagacattacaaaatatgaaccggcagtggatccgggccacagcgacagcgctggaacgcagcagtgagcttcagggaattggattgaatgaaaagtttctttattgttgtgaaaaatgggtccagcttctggacaagatagaagaaatgctgaaagtgaacatggccagcaatcttcaagctctcctggaacagcagaaatcctatgcgatgttagaagctgaagtttctataaaccagacaattgctgactcttttgtcacccagtccttacaactcctgaacacagcagaagtagagaagaggccggagtttgtttcgaaatttacgatgctgaaggaccagtggcagagtgctgcccagagggttcatcagaggaagggtgacatcgatgtgctagtgaggcagtggcagtacttcagcgcctctgtagaggacttgctccgtttcctcactgacaccagccacctgctgtctgtggtgaggagccaggattgctacagtctctaccaaacaaggagtctgatccacgagttcaagaataaagaaatttattttcggagaagacaaaccgcctatgcactaaccttggaagctggggaaaagttactgagcgtaactgacctggaaactaaagaatcaattgacaagaaaatcagacaacttcaggacagctggaagggtacagagcttcaagtaggagaaatgattaaacatttccagagccttgtagagacttgggaccagtgcgaaaagaaaatcaaggagttgaaaagcaggctgcaagctttaaaggcaaaaagtaaagatcctcttccagaacttcatgaggacctccataaagaaaaggagctgattaaggaactagagaagtctttggctaactggactgagaacttgagagaacttcacaccatgaaggctgacctaacccagcacattcttgtggaggatgtgatggttttgaaagagcaaattgagcatttgcacagacaatgggaggacctctgcttaagagtggctatgcgcaaacaggagattgaagacagactcaattcatggattgtgttcaatgaaaagaataaagatttgtgtgcatggctggtgcagatggaaaacaaagttctacagacagccgatattagtattgaagaaatgattgaaaagctacagaaggattgcatggaagaaataaacatgtttagcgaaaacaagttccagttgaagcaaatgggagaccagctgatccaggcgagcaacaagacgagagcagctgagatcaatgacaagctcaacaaaattaatgatcgttggcaacatctttttgacgtcattggatcaagggtgaagaagctgaaggagacctttgcatttattcagcagttagacaaaaacatgagcaaccttcgcacctggttggctcgaattgagtctgagctttctaagcctgttgtttatgacgtctgtgatgatcaagaaatccagaagaggcttgctgaacagcaggacctgcagcgagatattgaacaacacagtgcaggggtggagtcagtgtttaacatctgtgatgtcctgttgcacgactctgatgcctgtgccaatgagacagagtgtgactcaatacagcagaccaccaggagcctagacagacgctggaggaacatttgtgccatgtcaatggagcggcgaatgaaaattgaagagacgtggcgcctgtggcagaagtttttagatgattattcccgctttgaggactggctcaagtcagcagagaggacagcagcctacccaaattcctcagaggtgttgtacacaagtgccaaagaagagctgaagaggtttgaggcctttcagcggcagattcacgagaggctcacccagctggagctcatcaacaagcagtaccggcggctggcccgcgagaaccgcacagacacagccagcaaattgaagcagatggtccacgagggcaaccagcgctgggacaacctgcagaaacgggtcacagctgtgctgcggagactcagacatttcaccaaccagagggaggagtttgaggggacccgggagagcattctggtgtggcttactgagatggacctgcagctgaccaacgtggagcacttctccgagagcgatgctgatgacaagatgcgccaactgaatggtttccaacaggaaattacattaaataccaacaagattgaccagctcatagtttttggggagcagctgattcaaaagagtgagcccctagacgccgtgctgattgaagacgagttggaggagctgcaccggtactgtcaggaggtgttcggcagggtctcccggttccaccggcggctgacctcccgcactccgggcatggaagatgaaaaggaggcctctgagaatgaaacagacatggaagactccagagagatccagagtgactcctggcgtaaaaggggcgagaacgaggaggccgcgtctcctcagtccctttgccatctagtgcccctggcaccaggacatgagcggtctggctgtgagacccctgtcagtgtggactccatccctctggagtgggatcacacgggcgacgtagggggctcctcctctcatgaagaagacgaggagggcccatactacagtgcactgtcagatgtagaaatccctgaaaatcctgaggcctatcttaaaatgaccacaaaaactttgaaagcatcatctggtaaatcaatttctgatggccactcatggcatgttcctgatagcccttcccatcccaagcgtcactacaaacaaatggaaggtgataggaacgtaccacccatcccttcagattccagcactccctacaaaccagcttacgcaaagctgctcttacctccaggcactgatggtggcaatgaaggcccaagagtcttggacagcaggccccagcaggaagaggaagggctggctggtctaactgtgcagcagacaggtgcctttgacagatgggagctgattcaagcacaagaacttcacaacaaacttagaataaaacaaaacttgcagcagctgaactctgatatcagtgacatctccgcttggctgagaaacactgaagcagaactagaaacattaaagacggcagcagccccctccgatatccaggaaatggaactcagagtgaagaggctgaaggagatcttaaaagcctttgacacctacaaggcattaatggtcactgtccacgagagcagcaaggagtctctgcaaactgagagcgccgagtccaaggagctccaaaacagactccaccagctgagcctgcactgggaggcggcgcagggggccgtggacagctggagagagggcttgcggcagtcactcatgcagtgccaggacttccaccagctgagtcagagcctgctcctgtggctagcaagtgccgagaaccggaggcagaacgctcatgtcactgatccaaaggccgacccccaggctctcctggagtgtcagaaagcactaatgcaacttgaaaaggagctattggaatgtcaacctcaagtagactccttacaggagatttcaaccagtcttcttattaaggggcatggagatgattatattgaggctgaagagaaagtacatgttattgggaagaaactcaaacagttacttgagcaagtgtcccaggatttaatgtccttgcagagaagccagaacctagacccatctctgcctggcttcgacggggtcgactctagtggccagcacccagcagcatccgtgccagcaacccaggcgaagcaggttggagctgagagaactacaaaaggcaaaaacgagatggacagcagggtgcctggccccagcagctcgcggccacagcgctccttcctctcccgggtgatcagggcggcactgcccctgcagctgctgcttttgctgctgctgctcctggcctgcctgctgccctcctccgaagaggactacagctgcactcaggccaacaactttgcacgctctttttaccccatgctgaggtacaccaatgggccaccccctacatag

SEQ ID NO: 16 - DNA, 3181 bp, synthetic construct
  source 1..3181: mol_type = other DNA
atggcagaatgtgtcctccaccgcctggtcacctacttagaggaacttgaggctgtggacctgaagaagttcaagttacacctggggaccgcggcacagctgggggaggacaagataccctggggacggatggagaccgctggccccctggaaatggcccagctgcttgtggcccatcacgggtcaggggaggcctggctgctggctcttagcgtctttgagcggatcaacaggaaggacctatgggagcgagggcagaaagaggacctggtgagggatgctccgcctggcgctccgcctggcgccccgccctcactagagagacagtcaggacgtcctgtggaagcctttcttagtacaagaaaagatccctgggaaacctaccgcaactatgtccggaggaaattcctgctgatggaagaccgcaatgcacgcctgagagaatgtgtcagcctcagccacagatacacccggcttctcctggtgaaggaacactcaaatcccatgcggacccaggagaagcttctggccacgggtcgaagacactcaagaaccgtggaccaccaggccagccccatctgggtagggaacctcttcgagcctgacgagaagcggcctgagccaccccagactgtggtcctgcaaggggcagcagggatgggcaagtccatgctcgctcacaagatgatgcttgactgggctgaagggagtctcttccagggcagatttgatttcctcttctacatcaactgcagggagatgaaccagaaggctgagtggagcctgcaagaccttatctccagctgttggccagagcagaacgtgcctctcctggagcttgccccgattcccgaacgcctccttttcatcattgatggctttgacgagctcaagccttctttccacaacccccagagccccaggtgcttctgctggcaggagaaacagcccacagaactccttcttagcagcctgattcggaagaaactgctccctgagttgtctctgctcatcaccacccgacccatggctttggagaagctccaccgcttgctggagcatcccccggcatgtggagatcctgggtttctctgaggctgagaggaaggagtatgtctacaagtatttccacagcgtggagcaggctggccaagtcttcaacttcgtgagagacaacgagcccctcttcaccatgtgctttgttcccatggtgtgttgggtggtttgcacctgtctcaagcagcagctagagggtggagggcttgtaagacagatgtccaggaccaccacagcagtgtacgtgctctaccttctgagtctgatgcaacccaagccagggaccccaacccaccagaccccacccaaccagaaaggcctgtgctccttggcagctgatggcctctggaaccagaaggtcctattcgaggagcaggacctccggaaacatgggctggatggggcagatgtctcagccttcctcaacatgaacatcttccagaaggacatcaactgtgagaagttctacagcttcatccacttgagtttccaggaattctttgccgccatgtactatatcctgggtggtggagagactgggttgggtccagacaacaacttgagcagattgttggctgagtatgggtcatcggacaggagctttttggcacccactgtccgctttgtgtttggactcctgaataaagagatgagaagctacctggagaagaatctttgctggaaggtctcacctcacatcaggatggaactgctgaagcggattcagagtaaagctcagagtgaggggtctacactgcagcagggctccttggagttcttaagctgtttgtatgagatacaggaggaggaatttatccaacaggccttgagccacttccaggtggtcacggtcagccacatggccaccaagatggagcacatgatctcctcattttgtgtaaagaactgcaggagtgtcctcgtggtgcatttgtatggggcggccttcagtgcagatgaagacgatggagcaaaatgggctttggggtcccaggcgccactggcacagtcacccgagaggaacatcctacccaatgcctacagtgacgatcttgctgctgctctatgtaccaaccctaatctgatagagctggttttgtaccgaaatgccctgggaagccagggagtgaagctgttgtgccaaggactcagacaccccaactgcaaactccagaacctgcggctgaagaggtgccgagtctccagttcagcctgtcaggacctcgctgcagccctgacggttaacaggaaccttctgagggtggacttgagcagcaaccgtcttgggctgacaggtgtgaaactgctctgtgagggactccggcaccccaaatgccgactacagatgttccagttgaggaagtgtcaactggaggctggggcttgtcaggagatctcatctgtgctcagcaacaaccaacatctgatggagttagacctgacaggcaacgcactggaggatttggggttgaggctgttgtgccaaggcttgaagcacccaacgtgccatctacagaccttgtggttgaagatttgccacctcactgctgtggcctgtgaagacatggcttccacccttagtgtgaaccagagcctgagggagctggacctgagcctgaatgacctgggggaccctggggtgctgcttctgtgtgaaggtctcagccaccccaagtgcaaacttcagaccctccggttgggcatttgccggcttggctctgcagcctgcgagggtctctctgccgtgctgcagaccaaccaccacctccgagagctggacctgagtttcaatgacctgggagactggggcatgaggctgctgtgtgaggggctgcgccatcccacctgccgactccagaaactgtggctggatagctgtggcctcacagccaaagcgtgtgaggatctttcttccatgctggcagtcaaccagaccctgactgagctctacttgaccaacaacaccctgaaggacaccggtgtccggctgctgtgcaagagactgggtcatcctagctgcaaacttcgagtcctctggttatttgggatggacctggataaaatgacccacagagcattggcggcacttcgcgtgaagaagtcttacttagacatcggctgctga

SEQ ID NO: 17 - DNA, 933 bp, synthetic construct
  source 1..933: mol_type = other DNA
atggtctgcttctttatgtggtttgatattgactgctgtctccgagccattactgggaaacttgtttttccagaaaatctgctaaaaagaaaaatgcagtcagatccctattagaactgcctttggattataaccgccaccttgttccctgtaaggatgaaagtccgagatttggatcatatatgcttggctgtagctggttctgtgtttttagtccaattagggatggatttttggtccttgggttttttgtggttccttgtctcaggccggaagaatgggttaggaaaagaccaaaagaaaaaaaaaggggggggggaagcaaagctgccatggatccggagccgttctccctctggctcaggaaattccaatgttaatgaagccacctgggaagggtgggggagggataagagagataggagagtagcacctcggaatatagccagagttgcttgtctgcttggaatgactattttgtctgagattcccgaggggcatgtcgcctatgtgtgctggctgtgtggagattacccctgggggtctggcccgctgaagccgcagtcagatccgctgctgccagtccaaagcccagcgtcaaggttcccctgctgggacgctgcactcccggctccaaaatcagtcgctgcctctggggacttcttgtcccgccagccgcgtcgccgcgctgccagcgcggaccggcagggccccctcccggggttagttcaggggagtagagctgcgccccatgcttgtgccgtgacagctcccggtcaaaagcccggcgccaaggttccccagctgggacgctgcactcccggctccaaaatcagtcgctgtctcccggggactccttgtcccaccagccgcgtcaccgtgcacccctgtggaccggctgggccccctcccgaggttagttcaggggagtag

SEQ ID NO: 18 - DNA, 6446 bp, synthetic construct
  source 1..6446: mol_type = other DNA
atgggcctccggcttctgccgccagtagcaactgtggaagaagtggccggagcaggcagggcaggagtcctggagaccggggaggctgcggacagcgaggttgccgctctagaggtggagaggaggcctccgaacggcggtgccagccttcgcacgacagccggcgtggggcttgagccagggctcacctcgcacgagaagatcctggctccaaatttttttaaaagactcaaaggctggacggcgccggtggtgggcgccgcgctgcgtgccttgcgtggggcgtgcggcggccaaggcgggaacctcgagcggctgcgccttggccggaggtatcagcggtccgccgccgggccgggcggggccgggaccgaggcaggcggggtcgagcgggcgaacggtcggtgtggtgtggacggccctggggcagccctggaggtggcgggccggtgtagaataagcctttgggcctccccgaggcccccacactgcccccagtccaggacgcacctgtcagcctggtgccaggtcctcaggctcgtgggcccccacgcctcagtgcctgccaacctctgcccccgcgccccgccagcgtggcagcccccacccctcagtgccttgcctgacctctgctccactcccccctcagtgtggcagcagcccttactcaatgtcttcagacacttcaaggtggatgagtggaagaggtccaccaaggagggtgacatgcctttagtgaaggacaagaccctgagaagcactgtgtaccagatccggggatctgtgtctgccagcaactacatccagctccccaaaaccagcacccagtcgctgggactgactgggcagtacctgtatgttctcttccagcccctgcccaccaagcacttcatcatccacctggacttggccattgaggtgcaccaggttgtccgtgtgtccttttccaacctattcaaggagttcaagtctatggctacgtggcttcagttccccttcctctgtgaggcgcggctgtccaggccaggcgcgggcccccctggtacctgctggacctgcctgcatctagacttgcaggacaccctgctcatgtacctgaaccagcattatgggcaccttaagagtgtccacctgtatgcaagcatgctggtctggaacctctacaccagtgatctgtgctttgaccccgctgtgaccataactgaggcccagtgcaacaagttggctgtcactcccatgccacgagaaatggcattcccagtgccaaagcgggagtgctggcatgactgctatgtccacatgtggtgtgccaggccgtgggcaggtggtggctgggagcttgtggctatggggtcccggcacagccactgcctcactaggcatatctgtttggtagtcaccattgcccttgcccctgctgtaggcctcctggggcctatgctatgactcattccacgtgtggtggttggcagcagaaccctgaaggacagcgtgtcccccgtggtcccgatgtccagtcccacagcatcccacccggccgcctcggtgtctgtgtccttcctggaggtcagtctgtccttacagcccctggaggccttggctcaggtgggggctggcgatggtgtccacacgtttgcccacacgcaggctatagcgccttgggccctggaggatgttggctctcaggaggctgccagcagcaagcagagcagacaggagatggcttggggcaagaatccctctcaactgagaagcttactcccggttccgatcctgaagctcaagggggtcattggcttcgggggccccagcaccagatgggccctatggaccaaggatggggccactgttatgtacccttgccatgtggtcattgtcaccctgcagatctacacgagcgagcagcgcttcttccttggccacactgacaagatctctgccctggcacaggatgggagcagcttgctgctggcctcagcacaggtgcagcctctgtgcatggtgtggctctgggacttccagacagggggctgcctgtccatgttccagagcccagtccattctgtctgctccctcagcatggacctgcaggctgttgcttgggcacgcttggccaaccctccccgcaatgaatgcaggatggcgttatgtgagcggggaactgtgcgtctgtggcggctgtgtggtggggcgttacactcctgcccagaggacctggtggagcaccacatgctgcacttcactgaccttgccttcctccagtcgtgccaggaagggccacatatgctctacgtgtgcaactagagtggtcacattctggaggtggatgcccagtgcatggctgtgaggcatgcccgccgcctgttgcccatgcagccccccaagagcccccactagcagaagccaaccttcacttcaggccccggcatcaccatcagcgtcagcatctccccagccctgtgcgctatgggctccgaggaccactacctgcgtctctggcttctgaacttctccgcggtgcacctggaggcagagcacgagggcccagtcagctcagtctgcatcagccctgatggccagcacatgctctccaccacctccatgggccaactgggcttcctggacatggcatcacaggagtaccgtgtgctggtctgttcccatactgcctctgtgctggcctgcgccacagagccagtcagtatgcagcttgccactgttgcccaggatggcaccatctgcatctgggacctggcaaccctgcagcagctgtatgatcttacacccctgggtgaggccccaggcacagtgacctttcaacccactcagcagatcccgtcctgtggcttccgtagcagcactgtgtggtccttcagcctgacgacctcagatgtgctgatggagcacaggtgacacagaggggctatgactggcctggccgtcactcctgatggcagcttcctgttcagcacctgttctcagggcaccctggcccagtacaactgcacagacccctggtgctctcatcccaaagccgaggatggctgtcccgctcatctgacccgttgcccccatgctgccccaggaagcatggtatgccaggatgcctggccaagccccggtgccctggcggtcagcggggacaagcctcctgctggccttcgtgggcccctccaagtacacagtgactggtggccgcggcctccctagacgaggtgagcagctggggtctcctctcctgtctggggtgtgggcctatgcatgtgcactctgcccagcggcagtggctgacgctcacgcactgttgccccagctgctgcaagtggatgtccgcgccctgcttcaggccatctgcttccggccccagtccaatagccacctgctggtgtccaccttctccaccaaagtcctggtgctggatgtcacgtcggggtgcaccatttgggaggtgagccccagagcactatcgcccttatcccttgacaaagacagaacccccaggccactgctgtcccccaagagctgtctagcctaccaccacttgaatgacgccaagctatctgacgtccaccctgtggcctgctcctccctggctttcagtgaggatgcccgcctcctggtgacggccggtgaccaggccatcaaggtgtgggactcctcaacataggcacaccctggctgccaggtttccctcgggcacttggagcctgtgcagggcatggccttcacccccgaccagcagcaggtcctcagtgtgggagatgctgtcttcctctgggacatcctggtctccctgagaggataccccagggcatgcaagtgtccactttgccctcgtgcccacccaccacacagcaccttctctgtaccctctgtctcattgcttctgcagtgtccaaggctcagccagggcctcaccagccttcacccacagagccggggccatatccctgagcaccacctgtggtgccttcaatccccagggccggctgcaggacagcaggaggtggatgccatctctggagccagtgggctcccctggggccgggtgcctgtgctgtcccagacctgcctgccccagctggcagttggtgccacactcccagagggtagtgacggcatgtcctcagtgttcagtgatgaaggacccagtgaggatgatagtcctgcggggccccgccaggtcccaggccctcctgtgctggtggagaagggagctggcggggacaggccaaggagggccacagcggtcccctggggactcggcaagcctgcctgcccccatggctggcccgcccttcgtggtatacttcgaggcctcccagctccccaagctggtggcaggcagctgcacctgaaggccgttgtgagctataacaggaatggacatgccaacatggtgtggaggccagacacaggcttctttgcctacatgtgcggcggcctggtggtggtagaggacctgcgctctggctcctggcagcactggttcggccaccccgaggacgtgtccacactggccctcagccatgatgcctaggtgttggtctctgtcttgggccacagcagtgaggctgcctgctgctagatctgcatctgggatgtgtttatgggcatctgccagagactcatctctcaccatgattccgccatccaggccctggccttctcactggacgtcaaggctccttatcacactgggtgactacagcaactgcactcttgccctgtggagcatggccacccatgaacttgtgaccttcacccacctcccagagccagtgcatggcgtggcattcagtcccggggatgctcccaagctcgcctatgtgtgccagggcgatgtcactttctggctcctgcagcagctaaggacagacacctgcctccaggtgcattgcgaatcgttccttgtggagttgggaaccagcgagctcaccaccttgtgcctcagcacagtgcccctactctgctgcagctccagtgccggccaggtctgcgtctgggacacttgctctggctgctgcttcctggcctgggaggctgatgatggcgagattggagtgctgctgtgtgtggggacgcagctggtcaccggcagcaacacgtggcggctgcacctgtgggccacaggagctgtgcaggagctgaaactgaagggcttgggcatgaggtccagctctgtcctcctggagcacgagctgacgctggacggggacatcgtgagtggtgcttttgatgcctgcatggacatgggcattgtgggcaccagggcgccagcatccaccttatcagtgaccacagaagcaagccctgacaaatcccactgcaccacctgtggcgaggatgggagtgtgagggtgtggtccttggccagcatggagctggtgatccagttccaggtgctgagccagagctgtctctgtctggcttggagccccctgtcccatgggcagctggggccacagcagctggtgggcagctacagcgacggcacactgcgcatcttcagtgtttcccaaacagagatggagctcaagatgcacccccactcatctgcactgacggctgtggccttagccactgacgatgagggtcagatcatcctctccagggacaaggatgggctggtggccatgagctgcccccacgcagggatgactctctgagtgctgagagaccaccaggacacccccatttctgccacccagtgcagaagcaaggagcatggagattttggggtgccgggtgcagacctgtggctggccgtcagcagggaccagcagatcagtgtctcggcagctgactggctggaggactgctgtgagcttgtggactggccgagcttcccagcacccatgcctgcagagtcgcctgcctgcttgctaccctgccttgctaccttctgttcctggaacaatgacctgctggtatgtgcccacctcggccctcgggaggagctgctcctcctgtacagcctctgccagaagcaggtggtagagacagtcccactgcccctttttgccatgtccctgagtctgtccctgggagcatgccttatggctgtcagctttgctgagcgcctggtggggctagtggactgtgcattggggactgtgcaggacttcgctggccacaacaactcggtgcacctgtgccagttctccctgtcagcacagctgctcctcacagcggcccacaaggaaatcctggtgtgggaggcgtcagctgctaaggcccaggggcagcagtgcccggtgccctggggtgtctccccagtgaccacctcaacagctgggccttctgctggccaggaaggctcagggttgccagtgaagtggccctccacaagagtgggctcaggactgtctgtaaccaagaccagctgctgtgaacttgggggtctgagaactgtgaaatgctgttggcttttcttctggggttaa

SEQ ID NO: 19 - DNA, 10168 bp, synthetic construct
  source 1..10168: mol_type = other DNA
atgcctgttggattcaaggagaggccaaccttttttgacatttttaaggcccaatgcagcaaagcagatttaggaccagttagccttaattggtttgaagaactttcttcagaagctccaccatataaatctgaacgtgcagaagaggctgaatataaaatcagcagttatgggtcaaatccctttaagacaccacaaaggaaaccctattacaatcagttggcatcaactccgatcatattcaaagatcaaggaaaggatattgccagtagtaaacaaagtcgtttctcagtgagggctgaaatgtctcaagcaaaggatgttaccagcccgcttctcaatccttgtcttagtgaaagtcctgttctgcgatgcatgcgtgtaacaccacaaagagaaaagtcggtattatgtggaagtttatttcatacaccaaagcttatgaagggtcagacaccaaaacgtatttctgagagtctaggagctgaggtggacccagatatgtcttggtcaagttctttagccacaccaccgactcttagttctactgtgctaatagtcagagatgaggaagcacctgaaactgtatttcctgatgattctgctattttgaaaaaccatttttccaaccataataaaagtctgaagaaaaatgaccagtttatcccttctgtgccagacagtgaaaatgaaaaccaaggagaagtgataagtcgcgtttcagcagaattggggaacttccttggtgaagtgaatagctgtgaagaccatcctgaagggggagcgccaagtgctctagaagaagaaggacatgaaacagttgcacatatttctgaagaagatagtttttcacggtgtgttactaaatataaaacaggaaatctacaaaaagtaaagactgacaagactaggaaaaaatatttcaataaaacaaaagctggtgaatgtgaggaagctaaaaaactggaagaaagtagacatttgtttgcgtttgaaatggaaccaaatgacagtgacccattaggttccaatgcaccaggtgaagagcccactgggaatatcggccacacggtgtccaaggagcttgtagcatcttcagcctctgagtggcctcagctaaccctctctggcctaaatggaactcagatggagagaatacccctactacctacttcttgtgaccaaaataattcggaaaaagacctaataggcacagaggaagaatgtgccaacttcactacttcagaaaattctttgtcacgcatttcacgtttaccaaaaacagagaagctactgaatgaggaaagagtggtaaataagagcgaggaagggcagagtcctttatctcataaagactccattcttgcagtaaagcaaacagcatccggaacttctccggtagcttctctgtctcagggtatcacaaagtctattttcaagataagagaatcacctgatgaggcttttggtgcggttttctcagataatatgactgattcaaacttaaaagaaaaacctgaaacccctgaaagtggattggaaataggtgctaattgctcccagagatggggttccttatgtccaagtttagttgataatggaagctgcccagtcaccaccaaacatgcttctgtaactttgaagaatgctggtttaatatccactttgaaaaagaaaacaaaaaagtttatttattctgtaaatgataaaacatcttatccaggggaaaaaatgcagaaagatcaagtatctgaaccaactcactgttcagcccaatttgaagcaccgcttacgttcctaaatactgattcaggtttattgcattcttccgtcaaaaaaaatagttcacagaatgatactgaaggaccaactttgtctttaaccagctctttcaggacaattctgagaaaaagttccaataatgaaagcagttgtaataataaagtaatatctcaggatctgggttataaagcaacggaagttaatacagaaggaccgctgtcccctgtaaccacaggacctgactgtccgtcgtgcctacgggaaagccatggtgatggtgatcccacaggccagagagcttcagatgtaaaaagaaaggtcttggctgcagcacatcgcccggcagtacgacattcagaagttgaacgtagtggtgttcactttcaactgcagaaaagctttttatatgaccatcataatgccagcactcttggtttaactgctcggtccaaggatcctctatcaaactcagttgtgatttctagagataaagaatcatataaaatgtcagaggaactgaaacataagaatcgtgaagccacttttgaattaaccaaaaatattcccctggaaagaaatcaagaaatgtttgtcttgaatgaaaattctaaaaaagctgagttgtcaccccctgaaaaatacatgaaagtagcctcacattttgtgaaggtacaatttaaccaaaatatagatgtcacagtaatctcaaaagagcaagaagaaactgctttaatttcaaaaataactatagatccaaactccgaagaacttttcccagagaatgaggataattgtgtctttcaaatggcaaataaaaggaatacggctattttagaagatataaagggacttcccaaggcaagcttcggctgtgtcaaagagcccgttctcaagagccccaccatggtagtgtattcagacataggtgatgaacgggcagcccaactactgcttacagaaggtgatgactcatcagatgtagtccatgatcttacagaggagaacagaaatcgtgaaaagcagcatctaaaaatgactctaagtcaacatgtaaagtcagacgtctccttggaggtagacaggaaatcaagcagaaataacagttacgcgggaagacgagcaggactcttagatccagtttcaaattacagctttggaggtggcttcagaacagcttctgataaagagataaaactctctgaacacaacattaagaaaagcaaagcgctcttcaaagatattgaagaccagtatcctgaaagtttagcttgtgttgaaattgtaaatcccttatcattagatgatcaaaagaaactgaacagacctcatgcactagattggcagacgctgaaaaccgcatctggggacgagtggaacagtgtgtttgtctctgacaatagaagtggtcgtacagcgcctcagattttatctttaaaacaagattttaattcaaaccataatttaacacctagccaaaaggcagaaatcacagaactttctactatattggaagaatcaggaagtcagtttgaatttacacagttcagaaaaccaagccgcatattagagaataatacatgtgaggggtctgaaaaccagataactgtcttgaataactcttctgaggattggaaagatgttgctcttggcgtcacaactaatgccccacctaccagccaggtggataacagcaagaaatgggacggtgcagttggagataagcagaaggttgctggcctgctgaaaagtaacagtaatgaaagtgcttctggctgtttaacacataaaaataaagagaaatttacaggcttttgttctgcacttggcacaaagatcagtgtttctagtgaagctctgcagagtgctctgaagctgttcagtgatattgaggacgttcgtgaagacgcttctgcggaagtagatcgcggaggatcctctcggagtcagtgtgcttctgtcgtctccgtgtctgagttaaaaaacttgaacagtgatgaaaatttgagtgagaaacatagtaaatgccacgttatattacaaaataatactgacataactactggcatgttcgtagagtggaatactgacagttgtaagagaaacacagatgaagaagacaaatgtactggtaccagtagaaatgcttgcaacttaggagaatccaatggcaatgagtcaagtagaaatgataccgtttgtatttatgaagatgaaaatgccttgccatgtatgactgatcagcacgacgtgtatctagaagtatctaggcagtttataaaggagggaaacaatgaaattaaagaaggtgtatcagatttaacttgtttggaggttgtgaaagctgaagaaacatttcatgttgatagttcagataaacagtcagcttctaataaaatggggcaaaatgtgaaaaattttgacatacgtgatttacccattcaggccacaaataggaaaaatatcagagtttccaaagagtcactaaataaagttgtaactttatttgataaaaagtatgcagaagaagaattgagtaacttttcagattctttgagctctgaattgctttctgacctaaataacaaaatggacagttcaagtaatgaggaaagaaatacggttaaaaataaaatatgggaaggaagtaacccagttggtactgaaaataaattactgactgtccaccgacaacccaaatgtgaaattgaaaagaccagagaacccaccatgttgggttttcatacagctagtgggaaaaaagtaaaaattgcaaagcaatctttggacaaagtgaaaaatctctttgatgaaaacgagcaagataacagtagtgaagtcttcagttttccacatcaaggggcaaagactgtaaaggagatagaggagtgtaaagaagggcttgagttagcatgtgagacagtcaagacaactactttctcgaagtctgaagacacggtgaattctctaggcgataataagagaggcgttttttccgatgagaccatggagctcgtgaatgatcatttatgtagccacactgaaaatctcaaaacctcaagtagtgtttcttcggaagttgaagtacatgaaaatgtagaaaaggaaacagcaaaaagtcctacgacttgtttccgaaaccgctcaacctgttcagccagtgaaaatacagctttagcgttttacacaggacgtggcaggcagatttctgtgagtcagacgtcactatcagaagcaaagaaatgggttagagaaggagaattggaggatcagccaggaaaaataaatgctgccaaggttgcttgtttaaaagaacaccctcagggttgtgtaggaaacccctcatatggaaatagttcagatagcatcataacagaaaatgacaaaaaccatctctctgaaaaacaagatctaagttacttaagtaccaactgtttacacaattctgatttgtgtcattcagatgaggtacataatgaatcagggtatctctcaaaaaataagatggacaatggtggtattgagcgagtggtgaagaatgttaaagacagagaaagtactagtgtttccgaagtaacgtctacggtaagaaaagcaaacacagacccacaaactggaaatgaagatatttgtgctcagaaacttgtgactggcacttcaccatgcaaaaatgaaaacgtagccactgaattcgttatatctgatttaaataattttgaggttggaccacctgtattcagtacagcaagtggtaaaatagtatctgtttcacgtaaaacaataaaaagagtgagtgagatatttgcagacagctccagtaaggtcgttcagcaaaacactgagagtaaatcagacgctgataaaacgaaacctgtggcagattgctctgcagaattagatggtccagaaggtgatgcttttcctaaccctctaggtggcgaggagtgcagcatgcattcacgtgaggctcttgatgacattcatagtgcacaaattttaccacataaccagagtatgtctgaattggacaaagtttctgaaatacggccttgtcaggttaacttgaaaacttctgacgtatgtaaattgaacacggggatgcttcccaagtctctctcttctacaaatgcttgtgggatttttagcacagcaagtgggaaatctgtacaggtgtcagatgcttcattacaaaagacaagacaggtgttttctgagattgaagagagtaccaagtatctcttttccaaactatcctttaaaagtaatgaagattcaaacaagttcacaaaagaaaaaaatactgtgatacataccaaaaacaaattgttaccaccccaagaaggcttttcgtctagtgtgaacttgtctgcctcctctggatttagtacagcaagtggaaaacaggttttaatttctgaaagtgccttacacaaagctaaagaaatattagaggaatttgatagaatcacgactgaatgtagtcatcatttacctacgtctagacaagacgtatcaaaaacacctcctcgcattggtaagagaatcccaaaacaccctgtaaatgccaaaatggaaaaaacctgctataaagaatttcggttctcaaataactctaatgttgaaaatggttcttcagaaaccgaccaccctatcaaagcttctccgcatctctgtcagtctaagcaagaggtgacactagttgagaatgttcatctttcggcaaaagagcaaactttgcctagaaatataaaaatggaaattagtaaaatcaaaactttttctaatcttcctgtgaaaacaaacatggaagtttgttctacttactccaaagatccagaaaaccgttttgaaacagaagcagtagagattgccagagcttttatggaagacgacgagctgacagattctgaacccccgagtcatgccaaacatcctcaacttacctgcccaaaaaatgaggaaccggctgtaagaattgggaaaagaagaaatgcgcttgtctcagcaggagaacccccaatcaaaagaagcttgttaaatgaatttgacaggatagtagaaaatcaagaaaaatccttacaagcttcaaaaagcactccagatggcacaataaaagatagaagattatttatgcatcgtatttccttaacaccaattagctgtgcaccaatttgcacaactgaaaaatggcaagaaatacagaatctgagttttaccgcgcctggtcaggaatatctatccaggtcccatttgtttgaacacttggctttggaaaaaccttcgagcagtttatcggtttcaggacagccaccttacaacgttcccgccacgagaactgaaaaagcgaaacactcagttactacaggcaaaccgaccaaagtcttcgttccaccttttaaaactaaatcacatgctcaaagaaatgaacagtgtgctgccgggaatgttaatttggaagaaaacaaacaaacacaaaaaagtgccgttaagcttggctctggtgatagtgaaaataacattaatgaaggtggaattcatccatttaacaaaaataactcccatcaggcagcagctgtgacgttgagagagcgcgggaaggaaccactagatttaattacaaatcttcagaatgcgagagatagacaggatacacgaattaaaatgaaacaacggcagcgtgtttgtccacaaccaggcagtctgtatctcgcaaaaacgtccacggtgccgagactgtctctgaaaatggcagtcggaggccgggccccctccacgtgctctcctaagcagctatatatgtacggtgttcctgaacattgcgtaaaaattaacagcaagactgcagagtctttccggtttcacgctcaggattattttggaaaggaggccttgtgggctggaaagggaatacagttggctgatggtggatggctcataccctccaatgatggaaaggctggaaaagaagaattttatagggctctgtgtgacacccccggtgtggatccaaagctcatttctagagattgggtctacaatcactatagatggatcctatggaaactggctgctatggagttttctttccctaaggaatttgctaatagatgtctgaccccagaaagggtgcttctccagctgaaatacagatatgatgtggaggttgatagaagcagaaggtcagctataaaaaagataacggaaagggacgacactgctgcaaaaacacttgttctctgtgtttcggcgataatttcatcgaacacaaatgtacatgaaacttccaacagtacaacgaatagtgtgggttccagaagcgtggccatcctcgagcttacagacgggtggtatgctatcagagcccagctcgacgcccccctctcggtgctcttgaagaagggcaggctggcggtgggtcagaagatcatcacgcatggagcagaactggtgggttctccggatgcttgcacacctctcgaagccccagaatctctcctgttgaagatttctgctaacagcacccggcctgcttgttggtatgccaaacttgggttcttccctgatcccaggcctttttctctacccttgtcatcactgttcagtgacgggggacatgttggctgtgttgatgtcatcattcagagagcttaccctatacagtgggtggagaagacgccttctggattgtacatatttcgtgatgaaagagcagaagaaaaagaagcagcaaaatatgcagagacccaacaaaagaaactggaagccctgctcgctaaaatccaagcggaatttgaagagcaggaagagactgcagctaaacaatgtataccgtcgcgtgcactaacaagacagcagatccgtgctctgcaagacggtgcagaactgtacgaagccgtgaagaatgcgccggacccgggtcaccttgagggttatttcagtgaagagcagctgagagccttgagtaaccacagacgggtgttgaacgataagaagcaagcgcagatacagtcggaattcaggagggccgtggggtctgcggaaccgggggggccaggcttgtcacgggatgtggcggctgtgtggaagttgcgtgttgtgacctatgagaaaaaaggaaaagattcagttatattgagtgtttggcgtccatcatcagatttatgttccctgttaacggaggggaggagatacagaatctatcatcttgcaacatcaaaatctaaaagtaaatctgaaagagctaacatacagttaacagcaacaaagaaaacccagtatcaacaactgccggcttcagatgaaatcctactgcaggtttaccagccaagagaaccccttcacttcagcaaattattggacccagacttccatcccccttgctctgaggtggacctaataggatttgtagtgtctgttgtgaaaaaaccaggttttgcccctttggtctatttgtcagatgaatgccataatttgctggcagtaaagttctggacagatattaatgaagacattgttaaacctcctacactaattgccgcaagcaacctccagtggcggccagaatccgcatcaggaattccgactttatttgctggagatgtttcgacgttttctgccagtccgaaggagggccacttccaggaggcgttcagcagggtgaagaatgccattgagaacactgatgtcttttgcaatgatgcagaagacaagctactgcatatacttactgcccacgaccccaagtggtgcaccccgaataaagactgcacttcagagccgcactctgctccagcaggccttggtgcagacagtaagtttctgccaaaagggaagtctctttccacacctgtatcagcccagaagacttcgaaatcttgttgtaaaggggagaaagacagtgatgaccaaaaaaccgtcaggaagagaagagccttggatttcttgagtaggctgcccttacctccacctgtcagtccgatttgtacatttgtttctccagccgcacagaaagcattccaaccgccacggagctgcggcaccaaacacgaaacacctataaagaaagcaggatggacttctcctcagatggctccacttagaagggccagtgaaacttctgttttggaaagtgattcgatacctgacgaagagctggcattgataaacacccaggcccttttgtctggctcagcaggagaaagtccactcatctctcagtgattccactgggaccacacctactagttcagaagatcacctggaactgcagaggcctcacgctacatctgggatcaaagaacgagcaaatccccgagccagcacagaagataagatgagcgtaacacagaatacgactaggggacttctcagacgacagacgcaaacatga

SEQ ID NO: 20 - DNA, 12429 bp, synthetic construct
  source 1..12429: mol_type = other DNA
atggctgcaccgggagcgggtctgcaaggttccttgcagcagctgcaggagtgcttgtcagccgtggaccgtggcaccgccgcgatggccggttatcacctcatccgcggcctgggcctggactgcgtgctgagcgccagccccacggcgctggcattacagacttccttagttttttccagagattttggtttgcttgtatttgtgcagaaatcacttggcattgaagaatttcgtgattgtagagaagaagtcctaaaatttttatatatttttgtagaaaaaattggccagatgatcacaccttattctcttgatattaagaatacttgtaccagtgtttatacaaaagataaagctgctaaatgtaaaattccggccctagaccttcttattaagttgcttcagactttgagaagttctagactcatggaggaattcagagttagagaattattcagcaaattttatggagaacttgctttgagaacaaaaataccagatacggttttagaaaagatatacgagctcctaggagtattaggtgaagttcatcctagtgagatggtaaataattcagaaaaactgttccgggctttgttgggtgaacttaagacccagatgatgtccacagtaagagagcccaaactgcctgttgtggcagggtgtctgaagggcttatcttcactgatgtgtaacttcactaaatccatggaggaagatccccagacttcaatggagatttttgattttgcacgaaaggccatctgtcctcagattgacctgaagagatatgctgtgccctcagctggtttgcgcttgtttgccctgcacgcatcccagttcagcacctgtcttctggacaactacgcgtctttatttgatgtgctgtcaaaatggtgcgcccataccaatgtagaggtgaagaaagctgcacatgtggccctggaggcctttctaaaacaggtttcttttatggtggcaagagatgcagaaaggcataagaatacgctggagtactttatgaaacaattctacgaaatcatcagaaatgtggattccagcaacaaggagttatccatcgctattcgtggatatggactttttgcaggaccttgtaaggctatcagtccggaaaacgtggactggatgtacgttgagctcctccagcgctgcagacagatgttcctgactcagacagacacccccgatgaccacgtgtaccagatgccgagtttcctccagtccatcggcagcgtcctgctttacctggacactgttcctgaggtgtacactcctgttctggagcacctcatggtggtgcatatagacagtttcccacagtatagtccaaaaatgcaggttgtgtgttgcagagccatagtcaaagttttcctggccttagccgacaaaggaccagtcctctggaattgcattggtactgtggtgcatcagggtttaatcagaatatgttctaaaccagtggtccttcagaaggatgctgtggcggtggctaaagaccttcctgcctctggggaagtgcgaattggcaagtggaaagtgcccgagaccaaggactatttggatctttttagaaacctcatgagctgtgaccagatgatggattctcttttagcagaagaagcacttctctttgtgaattcctcccttcacaatctgaatcgtttgctgtatgatgaatttataaaatctgttttgaagattgttgagaagttggatcttacactagaaaaacagaatgctggggaacaagaggatgaggatgaagctactggtgcttgggcgatcccaacctcagatccagccgctaacttgcgtcctgctaaacctcaagatttttcggctttcattaacatggtggaattttgcagagagattcttcctgagaaacatgtggaattttttgagccctgggtatactcatttgcatatgagttaattttgcagtctgtacagttgccactcatcagtggtttctacaaattgcttactgttgtagtgagaaatgccaagaaaacgaagtattttgtgggcattagtccagagagtatgaagcactcttctggggatgcagaaaagtattcttgttttgctttatttgcaaaatttggtaaagaggtgtcagttaaaatgaagcaatacaaggatgaacttttggcctcctgcttggcattcgtcctgtccctgccatacaacatcatcgagcttgacatgagagcctatgttcctgcattgcagatggctttcaaactgggcttgagctataccccactggcggaagtaggcctgaatgccctagaagaatggtcagttaatatccacagatacgtaattcagccatattacaaagatattctaccctgccttgacggttacctgaaaacttcagccctatcagatgagaccaagaataactgggaagtatctgcactctctcgggctgcccagaaagggtttcataaagttgtgttaaagcatctgaagaggacaaagaacatggcatctgaggcatctaatgaagcactatccttagaagcaataagaataaaagtcgtacaaatgcttggacatctaggaggacaaataaacagaaatcttgtgacagctgcaacctcagatgaaatgatgaagagatgtgtagcgtgggacagagagaagaggctcagttttgcaatgccgtttgtagaaatgaagcctgtcctttacctggatgtcttcttgcctcgggtcacagaattagctttgttagctagtgacagacagactaaaattgctgcctgtgaacttttacatagcttggttatgcttatgttgggaaaggccactcagatacctgaaggtgacagtggctctccacccatgtaccagctctataagcggacgttccctgtattgctccaactggcctgtgatgtagatcaggtgacaaggcagttatatgagccgttagttatgcagctcatccactggttcaccaacaacaagaaatttgaaagccaggatactgttgctttactagaaactatcttggatggaattgtggatcctgttgacagtactttaagagatttttgtggtcgctgtgttcgagaattcctaaaatggtccattaagcagacaacaccacagcagcaggaaaaaagtccagtaaacaccaaatcgctttttaagcgattgtacagcttcgcactacaccccaatgcttccaagaggctgggggccgcactcgcctttaataatgtctacagggaattcagggaagaagagtccttggtagaacagtttgtgtttgaagccttggttgtctatatggaaagtctggccttagcacacacagatgaaaagtccttgggcacaatccatcagtgttgcgatgccattgatcatctaaggcgcatcattgaaaagaagcacgtttctttaaacaaagcaaaaagacgacgtttgccacgagggttccctcctgcgtcatcactgtgcctgctggacgtggtcaggtggcttctggcccactgtggaaggccccagacggagtgtcggcacaagtccatagagctcttttacaaatttgttcctttgttgccaggcagcaaatcaccttctgtgtggctaaatgatattatcaaggaagaaggtatttattttcttatacagcagtttgaagggggaggaagcagttgtgaccagcctgctggcatccttgctcagcccaccctcagccatctgccagggccgtttagtcttcgtgcgaccctgcggtggatggacatgcttctggcagcactggagtgctacaacacgtttatcggagagaagactgttggggcacttgaggtcctgggcactgaaacacagtcttcacttttgaaagcagtggctttcttcttagagaaccttgctatgcacgatatcacagcagcagaacagtgctttggctctggtgcgatgcatgacattcccagcccacaggagggagaaggatacaattacagcaagtgcacggttgtggtccgcattatggaatttaccacaacgctgctcagcaccactccggagagctggaagctccttgaaaaggacttactcaacaccagccttgtgaagctcgtggtgcaaacactgtgtgagcctgtgagcatgggcttcaacctaggagatgttcaggtcaaggatcgtcttcccagtgtgtgtgtgagcctgatggcagcactgaagaagctgccgtgtaaagacatcctagagacgcacctccaggaaaaaatcccagtgcagagcattgaggacctttgtgctattgacctgtataatcctgatgctcacgtggacaggaccaagctggcttctttggtatcagcatgtaaacaccttcataaagctgggttcttgcatgctattttaccatcacagcctgcagatctgcatcattctattggcacaaaacttcttaccctggtttataaaggcattggacctgttgaggaaggacagtgtcttcctgtgctagacaccagctgtaagcggctggccagtgggctcctggagctggcctttgcttttggaggacagtgcgagcagctggtggacctcctcctgagcacagcagcgctgtccatgccatcctctggccgcgcgcagaggagtgttgtcagcttctcccacggagagtatttctatggcttgttctctgaaaccatcaacactgaattgctgaaaaatgtagatactgctgtggtggggctcatgaaatcatctgaggaaaatccgaaaatggtgagtgctgttttgaatggcatgttggatcagagcttcagggatcgagccattcagaaacaccaaggactgaagcttgtgactgcagttctgcaaaactggaggcggtgtgagtcgtggtgggctgaagattctgcttctgaaagtaaaatggcagtgctggccttgttggcgaaaattttacagattgattcgtctgtatcttttaatacaaatcacagttcatttcctgaagtctttagaacatatgctagtctacttgctgattcaaagttgggtctacatttaaagggtcaagctgtaattattcttccattcttcaccaatcttactggaggaaatcttgaggaccttaagcgtgttcttgaaaagcttgtggtttctaatttccctatgaagtctgatgaatttccccagggaacgctgcggtataataattatgtggactgcatgaaaaagtttctagatgcattggaattatctcaaagtcctctgttgttccaattaatgacagaaattctttgtcgggaacagcagcatgttatggaagaactatttcagtccacattcagaaggattgccagtaggagttcgtgtgtcacacaattagctcttcttgaaagtgtgtacagaatgttccagagggatgacctactttcaaataccacccgccaggcatttgtagatcgttctctcctcactctgctgtggcattgttctctgagtgctttgagagatttttttagcaaaatcgtggtggatgccattgatgtgttgaagtccaggtttataaagctaaatgaatctacttttgatgctcaaatcaccaagaagatgggctactataagatgctagatgtgatgtattctcgtcttccaaaagatgatgttcattctaaggaatcaaaaatcaatcaagttttccatggctcaactgttactgaaggaagtgaacttacaaagtcacttattaaatcgtgctatgatgcatttacagagaacatgggaggggagagtcagctgctggagaggagaagactttatcattgtgctgcatacaattgtgccatttctcttgtctgctgtgtcttcagcgaattaaaattctaccaaggttttctgttcagtgaaaaaccagaaaagaacttgcttatttttgaaaatctgatagacctgaatcgctgctatacatttcctgtagaagttgaggtccctatggaaagaaagaaaaggtacattgaaattaggaaagaagccagggaagcagcaagtggggactcaggacattttcaaaatgatggtcctcagtatatatcttcattgtcatatttgggagacagtagcctgagtgaagaaatgagccaatttgatttctcaactggagttcagagctattcatacagttcccaagacaccaagtctactgctggtcactttcggagacgggatcatcaggagcccgtgggccaaggtgagctcgtggagctggagatggatgagctcaaccagcacgagtgcatggcccccctgacggccctggtcaagcacatgcagaggagtcaggtcacccccagggtggaggagggttcaatgccaagcaatcttcctccttggatgaaatttcttcatgacaaactagcgaatccatcagtaccattaaatattcgtctcttcttagccaaactcattattaattcagaagaagtgtttcgcccttatgcaaagcactggctgagccccttgctgcaactggttgtttctgaaagtaacggaggagaaggaattcactacatggtggttgagatagtggtcactgttctgtcctggacgggcacagcagctcctgtgggggtccctaaagacgaggtgttagcaaatcgattgctttatttcctaatgaaacatgtcttccatcaaaaaagagctgtgtttagacacaaccttgaaattataaaaactcttgttgaatgctggaaggactgcttatccatcccttacaggttaatatttgaaaagttttccagtaaagatcctaattctaaagacaattctgtaggaattcaattattaggaattgttattgccaataacttggctccctatgacccaaaatgtggcatagagagtgtaagatactttgaagctttggccaataatatagcttttgtaaaacataaggaggtatatgcagcagcagcagaagttctgggacttattcttcgctatgttactgagaaaggaaacgtatcagaggagttcatctgtgaactggttgtaaaacagttgaagcaacatcagaatagaatggaggacaaattcatcgtttgcttgaacaaagctgcacagcacttccctcctctggctgacaggtttatgaatgcggtgttcttcctgctgccaaaattccacggtgtaatgaagactctgtgtctggaggtggtgctttgtcgtgcagaggaaatagcagatctctacttgaagctaaagagcaaggacttcaagcaaatcatgagacagagagatgatgaaagacaaaaagtgtgtttggacataatttataagataatggtgaaattgaaaccagtagaacttcgagaacttctgaattctgttgtagaattcatttcccatccctctccaacatgtagggaacaaatgtataatattcttatgtggattcatgacaattacagagatccagaaagtcaaacagatcctgactcccaggaaatatttaagttggcaaaagatgtgttgattcaaggattgattgacaagaaccttgggcttcaattaattattcgaaatttctggagtcatgaaactagattaccgtcacatactttggaccgattgttggcactaaattcgttatattctcctaaaatagaaatgcactttttaagtttagcaacagattttctgcttgaaatgaccagcctgagcccagattatccaaaccctgtgtttgagcatccgctgtcagaatgcacatttcaggaatacacaattgattctgactggcgttttcgaagtactgttctcactccaatgtttattgagactcaggcttcccaaagtgccttgcagacccgaacccaagatggcttcctcacagctcgagggctcatggctgggcaagtaaggaccacccagcagcattgggacttcacacctacccaaaacacagatggaagaagctcatttaattggctaactggaagcagcattgacccgttggcagattacgtggtcttgccgtcgtctgattccctgtcttcctccttgctgtttgttcacaagaggagggagaaatcaccaagagcatcctcgaagtcagtaggacctaattttgggaaaaagaggctaggccttccaggggatgaggtggataacagtgttaaaggcacagatgagcaggcagaaatattaagattacgtagacgatttttaaaggaccaaggaaagctcagtttgatgtatgccagaaaaggtgttgctgaacagaaacgagagatggagatcaaaagtgagttaaaaatgaagcaggatgcccaagtcattctatacagaagttaccgccacggagaccttcctgacattcagattaaacacagcagccttatcacgcccttgcaagctgtggcccagagagatccaataattgcaaaactgctctttggcagcttgttttctggaattctaaaagagatggataaatttaagaccatgtctgaaaaaaatagcattactcagaagttgctccaggacttcaatcgttttcttaataccactttgtttttcttcccgccttttgtctcttgtatccaggaaatgagttgccaacgcccagacttgctcggccttgacccggctttggtgagtgctggctgcctggccagcctgcagcagcctgtcggcatcctgctactggaggaggctctgctccacctggagcccccagaacctcgctccaaacgggcccggggagtgccccgcccctctcttgaagtcctcagatggattgagctcgcaaaattgtatagatcaattggagagtatgacgtcctccgtggtatttttagcaacgaaataggaacaaagcaagttactaaggatgcgttattagcagaagccagaaatgattattctgaagccgctaagcagtataatgaggctctcaataagcaagactggttggatggtgagcccacggaagcagaaaaggatttttgggaactagcttccctggactgctataaccacctcactgagtggagatcgctggcatactgctctacagccagcgtggacagtaagcaccctccagatctaaataaaatgtggagcgagccattttatcaggagacatatttaccttacatgatccgcagcaagctcaagctactgcttcacggagaagacgaccagtccctcctgacgtttgttgacaactctgtgagcacggagctccagaaagttctcctggagcttcactacagtcaggaattgagtctcctttacctcctacaagacgaccttgacagagccaagtattgtattgaaaatggcattcagatctttatgcagacttattccagtattgatgtcctcttacacagaagtagacttaccaagttgcagtctgtacaagctttaacagaaattcaggagtttatcagctttataagcaaaccaggtaacttaacatcccaagttccccttaagagacttctaaaaacctggacgaacagataccctgatgctaaaatggacccaatgagcatctgggatgatatcatcacaaatcgatgtttcttcctcagcaaaatagaggagaaacttcgctttcttccagatgatcatagtatgaaagtggatggagatggagactccagtgacacggtggaaatgcaagagcagggagaagatatttattctctgattaagagctgtaagttttccatgaaaatgaagatgatagaaagtgcacgaaaacagaacagcttctcacttgccttgaaactgttgaagcagctgcataaagagtcaaaaacgagagaagactggctggtgagatgggtgcatagctactgtcgattgagccactgccgcagccagactcagcaccgtgcggagcagattctcactgtgctgaaaaccgtctcgttgttggatgagaacacatcaagctacttaaacaaaaatattctggcttttcgtgatcagaacattctcttgggtaccacttaccagatcatagctagcgccctcagcagtgagccaacctgccttgcccaaatcgaggaaagcaaggttagaagaatcttggagctttctggatccagttcagaggatgcagaaaaggtgatggtgggtctgtatgagaaggcattccatctcctttctaaagctgtgcagaccgctgaagaggggacccagtcttccaccaagcactgtgcccatgtggctggagctatagatgcttacatgactttggtagatttctgtgatcaggagctccataagaaggaagagaatgcatcagttattgatcctatagaactacagacatatccagcacttgtggtggagaaaatgttgaaagctttaaaattaaattctactgaagccaggctaaaatttcccagactactacaaattatagaacagtatccagaggagaccttgagcctaatgacgaaagagatttcttccattccttgctggcagttcatcggctggatcagccacctggtggccttactggacaaggaggaggccgtggctgtgcagcacaccgtggaggagatcgccgacaactacccacaggcgatcgtctaccccttcatgataagcagtgagagctatgccttccaagacacctctgctggtcataagaacaaagagtttgtggcaaggataaaaagtaagttggatcaaggaggagtgattcaagaattcgttaatgccctagaacagctctccaatcctgaaatgctctttaaggattggaccgatgataccaaagctgaactagcaaaaaaccctgttaataaaaaaagtattgaaaaaatgtacgacagaatgtatgcagccttgggagactcaaaggttccaggtcttggagctttcagaaggaggtttgctcaggcctttggaaaagaatttgataagcattttgggaaaggaggttccaagctacccacgatgaggctcagcgacttcaacaacatcactgcctcgctgctttcaaaaatgaacgaagcatcaaagacgcccaggaatttgagcgagtgctcaccctggatgagcaacttcaaatcggaatttttgagaaacgagctggagattcctggtcagtatgatggcaaaggaaagccattgcctgaataccacgcacgcatcactggttttgatgaacgggtaaaagtaatgccttctctcagaaaacctaagcgcatcgtcatccgagggcatgatgagcgagagtacccttttctcgtgaaggggggagaggatctgcggcaggaccagcgcatcgagcagctctttgaagtcatgaatgttgttctttcccgcaatgccgcctgtagtcagagaaacatgcagttaaagacttaccaggtcatacccatgaccaccagattaggattaattgaatggattgaaaatacttttaccttgaaggaacttctttgcaataacatgtcacaagatgagaaaacactttacctgagtgatcccaaagcaccaatgtttgagtatagagactggctgacaaagatgtctggaaaacgtgatgttggcgcttacatgctaatgtataagggagctagtcgtactgaaaccatcacgtctttcagaaaaagagaaagtagagtgccaggtgatctcttaaagcgtgcttttgtgaagatgagcacaggcccagaggccttcctggcacttcgctcccactttgctagctctcacgctctgttgtgcatcagccactggattcttgggattggagacagacatctgaacaatttcatggtgaatatggaaactggtggcgtggttggaattgactttgggcatgcatttggatcagctactcagtttctgccagtccctgagttgatgccttttcgtctaactcgccaatttaccaatctgatgttacccatgaaagaaacaggtctgatgtacaatgtaatggtgcacgcactgagagcctttcgctcacacccagacctactcactaacaccatggatgtctttgtaaaggacccttcctttgactggaaaaactttgaacaaaaaatgctgaagaaaggaggatcatggattcaagaagtaaacgtaactgaaaaaaattggtatccccggcagaaaataaattatgctaagagaaagttagcaggtgccaatccagcagttattacttgtgatgaattacgtctgggccatgagaaggaacctgtctttggggattatatggctgtggcacgcggaagcaaagatcacaacattcgtgctcaagagacagagagtggactttcagaagaaattcaagtaaagtgcttaattgaccaggcaacagaccccaatatccttggcagaacttgggaaggatgggaggcttggatgtga

SEQ ID NO: 21 - DNA, 12066 bp, synthetic construct
  source 1..12066: mol_type = other DNA
atgctggagtcatatgtgactccgattttaatgagctacgtgaatcgctacatcaagaacttaaagccctcggatttgcagctttcactatggggtggagacgttgttctcagcaagctcgaattaaaattggatgtgctggaacaggaactgaaattaccattcacttttttaagtggacatattcacgaattgcggattcatgtaccatggacaaaactgggttcagaaccagtggtaattactatcaatacaatggaatgcattttgaaacttaaagatgggatgcaggatgaccatgaaagctgtggctctaattctaccaaccgtagtactactgagaacacaaaatcatcaataaaagcccgaagaattcagcaaactgctcccacagatcctgatttaccaccaggttatgtgcagagcctgattagacgagttgtaaataatgtaaacattgttataaataatctcatactaaaatatgttgaagatgatatcgttctctcagtcaacatcacttctgcagaatgctatacagtagatgaattatgggatcgtgcattcatggatatttctgcaactgatctggtgctaagaaaggttattaatttttctgactgtacagtttgtcttgataagcgaaatgccagtggtaaaattgaattttaccaagatcctttgttgtataaatgttcctttagaactcgtctgcattttacttatgataacctaaattacaagatgccgtcggttattaaaattcacaccttagttgagagtttgaaactttccatcacagatcaacaactgccaatgtttatccgtataatgcaacttgggattgctctttactatggagaaataggcaattttaaagatggagaaacagaggaacctacctgtcacaataaagaaatgttaggaaacattacaggtgctgaaggtgaaacaagaatagatatgcagtatcctgctcagtacaaaactcaggagttgtattcacagcaagatgatgagcagccccagggatgggtatcatgggcttggtcgtttgtgcctgcaattgtgagttatgatgatggcgaggaagactaccttggaagtgatcctacatcagccatgcatcagcaaaaagcacagactttgaaggatcctattgtttctataggattttattgcacaaaggccactgtaactttcaaactcactgaaatgcaagctgagagtagttattacagccctcagaaagtaaaatctaaagaagtattgtgttgggaacaagaaggaactacagttgaggcccttatgatgggagagcctttctttgattgccagattggttttgtaggttgccgagcccagtgccttaaagcaattatgggtgttaaagattttgaagataatgtgaacagaagtgaaacagaagcctgtttcttcatttgtggtgaaaatttgagtgcaaaaggtttgacataccttacaaattcattgtttgattaccgaagcccagaaaataatggtactcgtgcagaatttatcttagatactgctcatcataaggagacatacactgaaataaccggaatgcaaaggtttggtgctttttacatggattacctgtatacaatggaaaacactagtggtaaaggttctgcaaatcagcaagacttttcttcagggaaaagtgaagatttgggaacagttcaggagaagtcaaccaaaaaccttgttataggtcctctggatcttcgcttggatagcagtgccgtgcatagaattttgaaaatgatcgtttgtgccttggaacatgaatatgaaccatatagcaggctaaatccagataataaggatgaaaatgaagctgtactgaatcctgaagaagtggcttctctggagcaatatattcctactcgacttacaagtgttactctcctcaaatgtacctgcacaattttcatggctgaattcaacttgctgggccatttgctacctgtcattatgggagaaaagaacttgagtaacttcatgaatactacaaacttccagcctcttcggcctttgccatccattcagatattggtggataaaattaatctggaatattcagtgccaatgtatgcagaacagctggtacatgtggtcagcagccttactcagccttctgataatctgcttcattattgctatgcacactgctaccttaagatatttggtttccaggcaggagtgacctctttggattgtaggggatcttacagtttacctgtaccaattattccctctgtcagcactgctgtttatggtaaacttctgaaacttcccatgtgctggaccaaacgatctcaggttcctataactgaaggtatatttgaacttccaaatctcacaattcaagctacaagagcacagacccttctgctgcaagcaatatatcaaagttggtctcatattggaaatgtcagctcttcagcagtgaatgaagctttgatgaatgaagtcttccaaagtataggtgtgaaatctaagaatcccctgccaactcttgagggctcaatccagaatgttgaattgaagtactgcagcacatcattggtcaaatgtgcctctgggaccgtgggatcaataaaaatttgtgccaaagccccaggcgataatggaaaagagaagttgattcccttgcttcagggtccctcagacactaaagatcttcatagcagcaagtggctcaatgaaagtagaaagccagaatctctcttagctccagatttgatagccttcacagtacaagttccacaacatatggactactgccacaattcaggtgctgtacttctttgtaatgtgcaaggactagcagttagtattgacccaatcttatatacatggctcatctatcagccccagaaacgaaccagtagacatacgcagcagcctgtggtcgctgttcctcttgttatgccagttaccagaaggaaggaggatgaggtgtctgttggaagtgctcccatggcaaagcagcagtcgtatcaggcctctgaatatgccagcagccctataaaaacaaaaacagtaacagaatcccgaccattgtcagttcccatgaaagccatgctgaatatatctgaaggctgcagaagtcctgaagaaagaatgaaagaatttattggaatagtatggaatgcagtaaagagtctcacactgcagcttgaagtacaatcttggtgtgtattcattccaaatgatagcctgccttctccaagtacaattgtatcaggtgacattcctggtacagtaagaagttggtaccatggacaaactagcatgccgggaactctggtcctttgtttgcctcaaataaagattattagtgcgggtcataagtatatggaacctttgcaagagattccatttgtcaatccacgacctatccttgaagaaggtgatgcttttccttggaccatcagcttacatcatttcagcatatatacccttcttggaaaacaagagacactttgcctagtggaacctatgggttgtacctctactctggctgtcacatctcaaaaactacttgctacaggacctgatacaagacattcatttgttgtttgtctacatgttgacctagagtcacttgagataaagtgctcgaacccccaggtccaacttttatatgaactaactgatactatgaataaggtctggaataaggttcagaagagaggcaatcccagtctatcttcagcctatccagagaccatcgtaggggctgtcccgagctctccagttagaagcagtgtaggcacagctcctccagacaccagcacatgcagcccatctgctgacatgggaactaccactgagggagattctgtacaagcaggtgatgactcaccattctcagactctgtcaccttggaacaaaccacaagtaacattggtggaaccagtggccgtgttagtctatggatgcagtgggtgctccccaaaattactgtaaagctctttgcttctgatcctgaaaatacaggcacagaggtttgtatggttagtgaactagaagatctcagtgcttccgtagatgtccaggatgtatataccaaggtgaaatgtaaaatagagagtttcaatattgatcactacagaagcagccttggggaagagtgttggtctttggggcaatgtggaggtgtcttcctttcctgtactgacaagctgaacagatgcaccttgttggttcgacccatcaacaagcaggaccctttcagtaattgttctggcttctttccttctactactgcaaaacttttagatggctctcatcagcagcatggatttctctctctgacatatacaaaagctgtaaccaaaaatgtccgccacaagttaacatcaagaaacgaacgaagaagttttcataagttatcagaaggtttaactgatggttctcctcattttcttcatgagattcttctttcagcgcaagccttcgatattgtcctttgttttcctttacttaatgccattgcaagtatatttcaagcaaaactaccaaggacccaaaaagagaaaagaaagtctcctggtcaacccatgaggactcatacactgacttcgcgtaatttacctttgatttatatcaacacaagtgtaatcagaatttttgttccaaaaacgaaggaaatacagcctactgttggagttaaccaggcagcaaaagaagacactatggttttaaagattggctctgttgccatggctcctcaggctgacaatccgcttggcagatctgtcctcaggaaagatatttaccagaaagccttgaacttaggaattcttcgagaccctggatcagaaattgaagatagacaataccaaatagacctacagtccatcaatattggtactgcgcagtgggatcaactaaaaccagagaaggaaagtggcacaggaggggtgctaacagagagtgaaagaaattctcaaaatccagcccttgagtggaatatggccagcagcataagaaggcatcaagaaaggagagcaattttgactccaattttgacagatttttctgtccgaataactggagcacctgccatcattttcaccaaaacaatttctccagaaaatttgcatactgaggagatattagtgtgtggccattccttggaagtgaatataaccacaaacctggacttcttcctaagtgtggctcaggttcaactcttacatcatttaatagtagcaaacatgactggactggaaccatcaaacaaggccacagagatctctaaacaagaacagaaaaaaatggatacatttgatggaggcgtggctgaaacctcatctcggtacagtggtgcccaggatagtggaattggcagcgacagtgtgaaaatcagaattgtgcaaatagagcagcacagtggtaccagtcaacatcgcattgcccgtccctcacgccagtcatcaatagtaaaaaatctaaattttattccttttgacatatttattactgccagtagaatctcactgatgacctattcttgtacagccttacccaaatctaagtcacaagaacagaaggataatgaaaaaacaggcaagagttcattaaatctcctggcagttgattcagaagatgtctctaagcccagccagacgtgtatttccacaatgacagcagaagatctcttaagcagtagcatttctttcccattagggaaaaaaatgggagttctctctcttgaaagtcttcatgcatccacaaggtcatctgctagacaagcacttggtgtaactatcgttcggcagcctggacggagaggaaccggtgatttacaacttgaacctttcctgtaccttattgtttcccagccttccttactgctgagttgccaccacagaaagcagcgtgtggaagtatccatttttgatgctgtgcttaaaggggtagcctctgattacaaatgtacagatcctgggaagactctgccagatgcccttgactactgcactgtttggctgcagacagtgcctggagaaatagacagcaaaagtggcatcccaccctcccttgtaatgctgcaaattaaagactttcttaatggaccagcggacatcaacttggatatatcaaagcctttgaaagcaaacttgagttttaccaaattggatcagataaaccattttgtaaagaagataagaaatgctcacagctttgcacacagcagagagacttcagccctgtcaaacaccacgctgaataaggatgaacttccagcctccaaatgctaccgtgggaagctgtctaagcctgaagttcctggtgatagagtgcaaaagattccagttcaagaaaacatgtggagagctgtttctggctttcaaaaaatttctgtccatactactcagattgtggtctccatggaaactgtcccccatcctagtaaaccatgcctcttagcctctttatcaaacctcagtgtaagccttagtgtcaaagcagcacagaaagtacctggtgtaattcttgggacatcatttctactcagcgtggatgatcttctccttaaaacaagcctcaaggaaagaagtcgggttctaataggaccatgttgtgcagctgccaatctggaagctaaatggtgtaaacacagtggcaacccaggcccagaacagtccataccaaaaatatccattgatttaagaggaggactgctacaggtcttctggggtcaagaacatttgaattgtttagttctcctacatgaattacttaatggataccttaatgaggagggaaaatttgaagtgcaagtttccaaaccagtgcctcaaatgccatctcctatggaaaagaatcaaaactttaaaagtgaacaaagttcagatgatctacggacaggccagtttcagtatatacaagatgctgaacctttgaaacttcctggtgtctatgaagtcttgttttacaatgaaactgaagatagtccagggatgatgttatggagatatccagaaccgagagtgctcacccttgtacgaataactcctgtgcccttcaataccacagaggatccagatattagcacagcagaccttggagacgtgctacaggttccatgtagtttggaatactgggatgaactccagaaagtttttgttgcatttcgagaattcaatctgtctgaaagcaaagtttgtgaactgcagttgccagatatcaatcttgtgaacgaccagaagaaactagtatcctcggatctttggagaattgtcttgaacaccagtcagaatggagctgatgaccaaagctctgcaagtgaatctggctctcaaagcatctgtgacccacttgtaactccaacagccctggctgcctgtactagagtcgactcctgttttactccatggtttgtcccatctcttggcatttccttccaatttgctcacctggagttccgtctttgtcatcaccttgatcaactaggcacagctccaccacaatacctacagcctttcatttccgataaaaatgtgccatcagaactagaatacatgattatttccttcagagaaccacacatgtaccttcgacagtggactgatagttctatgtgtcgggagatccagttctcagcccaagcagactgtaaactcctagagtgcagaaatgttacaatgcaaagtgtggtgaaacccttcagcatctttggacaaatttccatttccagtgatgcaatagaaaagctacttgactgcaccatggtagttgactctatatttgttaactttggacaacatgtagttcattctctaagcactgcgatacaagcttggcaacagaacaaatgccctgaggtagaagagttggtcttcagccattttgtgatctgtaatgacacacaggagacactgcggtttggccaggtggatactgacgaaaatattgtgctggcaagtctccatagtcaccagtacagctggcgttctcacaaatccccacagctgttacacatctgtattgaaggttggggcaattggcgttggtcagagcccttcagtgtggaccatgccgggacttttgttagaacaattcaatacaagggtcgaactgcttcacttatcatcaaggttcaacacctcagtggagtgcaaaaacagattatcatctttggaagacagatcatctgtagttacttgtctcaaagcatagaactaaaagttgttcagcattacattggtcaagatggacaagctgtggttcgagaacattttgactgcctcacagccaaacagaaattgccttcgtacatactagaaaacaatgaactgacagagctgtgtgtgaaggccaaaggagatgaagactggtcaagagatgtgtgcctggaatccaaggccccggagtatagcattgtcattcaggtgccatcttcaaacagttccattatttatgtctggtgcacagttttgactttagaacccagctctcaagtgcagcagcgaatgattgtgttcagccctctttttatcatgaggagtcatcttccagaccccattatcatacatttggagaaaaggagtctgggattgagcgaaacacaaattattccaggaaaagggcaggaaaaaccactgcaaaacatagaacctgaccttgtacatcacctaacatttcaagcaagagaagaagatggtacttcagattgtgctgttcccgtctcaacatccctcattaagcaaatagccactaaggtacaccctgaaggcacagttaatcagatccttacagaattctatgggccagaaaaatcccttcaacccatgtggccctacaataagaaggattctgacaggaatgaacagctgagtcagtgggatagcccaatgcgagtaaagctgtcagtctggaagccatatgttaaaaccttgttgatagaacttctaccctgggctctgcttatcaatcagtccaagtgggacctctggctgtttgaaggagagaagattgttctacaggttcctgctggcaaaattattattcctcctaactttcaggaagcttttcaaattggaatatactgggcaaatacaaacactgtgcacaagtcagtagcaattaaactggtccataacctgacatctccaaagtggaaagatggaggtaatggtgaagttgtgacattggacgaagaaggatttgttgatgccgaaataagacttggtgctttcccaggacatcagaaggtgtgtcagttctgcatttcttccatggtacagcaaggtatgcaaattattcagattgaagacaagactacgataatcaataatacaccgtatcaaatattttataaaccacagttagccctctccagtcctcattctggaaaggagtgttttcacgttccagacagcactacgtttagcatctgcccaggtagagagcagcctgccatgaaatccagctccctgccttgctgggacctaatgcccgacatcagtcagtcagtgctggatgcatccctgcttcagaaacaggtcctgctgggcttttctcctgctgtgggtgccgacagctcacagtgctggagcctgccagctgtagttagacgggagtttcccagacagagtgtggcagtgcccttcgggaccagcagggagaatggattcagtaccagggcaatagcactgacatatcaagaacactttggagtgacttacttaaccctctcagaagaccctagtcctcgaataattttccataacagatgtccagtaacaatgcttgtaaaggaaaatatcaaagatattccaaagtttgaggtttattgcagaaaaattccttctgagtgctccattcatcatgagctataccatcagatttccacttatccagactgcaaaaccaaagacttacttcctagccttcttttgagagtagagttgctggaagaaataacaactgaatggagcgatgccgtcgacatcaaccatcagggaacccaggttttgttcctaaccggttttggctatgtatatgtggacattgtccatcagtgtggaacagtctttataacactggccccagaacgaaaagcaggacctattttagccagtaccaacagaattgtggagaagattattacatttaaaatgctcatcactcaattgagcctggcagtgtttgatgacctcacccatcacaaagcatcgtctgagcttctgcgactcacactggacaatgtttttctccaaatggtccccatggctggtcacctccctgtggaagagaccccagcagcactctttcagctttactgtctggaggtctactgtggggacttgcagttggacaaccagctttacaacaagtccaatttccactttgctgtcttgctctgccagggagaaaaatcagaacctactcagtgttccaaaatgcagagtctcctcgtatccagcaaagatttggaagaatacaaggaaaattgttttatcaaactttgcatcaccttaactgagggcaagagcttcatatttgatattaatgagttcagttttgaattgaaacctgccaggttgtatgtggaagatacatttgtgtactatgtcaaaactttgtttgacacctaccttcctaacagcaagctggctggtcaccccaaggtcctctcaggtggtaaacaggtattgcctgtgcaggtcaggcagcacgccagggccttggtgaatcctgtgaagttacgaaagctggtgatacagcccgtgaatctccttgtcagtatccacgcttctctcaagctgtacatagcctccgaccacactcctctctccttctcagtgtttgaaagagggcccatcttcaccacagccaggcagctcatccatgccctggcaatgcactatgccgctggagctctcttcagagcaggctgggtggttggatctttggaaatcctcggcagcccggcgagtttggtgagaagcatagggaacgggattgccgacttcttcaggcttccgtatgaggggctgacccgtggccccggtgcctttgtaagtggagtttccagaggaacgacgtcatttgtaaagcacatctccaaaggtaccctcacatccatcaccaacctggccacgagcctggcccggaacatggaccgactctcactggatgaggagcactacaaccggcaggaggagtggcggcggcaactccccgagagcctgggcgaggggctccgacaaggcctgtcccggctgggcatcagccttctcggtgcaattgctggtatagtcgatcagccaatgcagaacttccagaaaacatcggagactcaggcttcggcaggacacaaggccaagggtgttatctccggtgtggggaaaggaatcatgggggtgttcacaaagcccattggaggagctgctgagcttgtgtcgcagactggctacggtattttacacggagctggactttctcagcttcccaaacagcgttatcagccaaacgatctacacgcggacaaggctccaaatggccatgtcaaatacgtctggaaaatgctccagtctctgggcagaccagaagtccacatggccctggatgtggttctggtgagaggctcaggccaggagcatgaagggtgcttgctgctgacgtcagaagtgctctttgtggtgagcatcagtgaggacacacagcagcaggccttccccatcacagagatcgactgtacactggacagcaagaagaacctgctcattgtgcagctcaaacagccaagagtagcctgtgacgtggaggtggatggagcccgagagagattgtcagagcaacagtacaacagacttgtggactacatcacaaagacatcttgtcacctggcccccagctgctcttccacgcaaacaccatgccctgtggtacctgtggagcctctcccctcccctcttaaaacataccactatttggttgatccatattttgctcaggtcttcattagtaaatttactatggtgaaaaataaagccctgaggaaagggttcccttga

SEQ ID NO: 22 - DNA, 1575 bp, synthetic construct
  source 1..1575: mol_type = other DNA
atgtacgcgctcttggtcctggccagcctcctgggcgtggctctgggcagcccggtcctcggcttaaaagaatgcaccaaaggctcggcagtgtggtgccaggatgtgaagacggcctctgactgtggggccttgaagcactgcctgcagacggtctggaacaagccagcagtgaaatcccttccctgtgacatatgcaaagacgtcatcgtggcagctggcagcatgttgaaagacaacggcaccgaggaggagatccttgagaacttggagaagacctgtgactggcttcctaacccgaacttaactgcctcctgcaagcagatggttgatgcctacttaccagtcatcttggacatgatcaaaggagaagcgagccggcctgaggaggtgtgctccgctctcaagctctgccggtctctacagaagcgcctggccgagctgaatcgccagaagcagctccagtccaacaagatcccggaactggacacatctgaggtggtggctcccttcatggccaatatccccctcctcctctaccctcaggagggtccccacagcaagccccagccgaaggctaatggggacgtttgtcaggactgcattaagatggtgactgacgtccagattgccataaggaccaactccacctttgtcgaggccttggtggaacatgtcaaggaggagtgtgaccgcctggggcctagcttggctgacgtgtgcaagaactacatcaaccagtattcagagattgctgtccagatggtgatgcatatgcaacccaaggagatctgtgggctggctggattctgtgacgaggtgaaggggatgcccatgcagactctgattcctgccaaggtggccgcggagaatgtcatacccgccctggagctggtggagcccattaagaaggacctggcccctgcgaaggcgagcgtctactgtgaggtgtgtgagtacgtggtcaaggaggtggctaaactcatcgacaacaataagactgaggaagaaataatccgtgctttggagaaagtatgctcaaaactgcccacttccgtgtctgaagagtgccaggaagtggtggacacgtatggcagttccatcctgtccatcctcctgcaggaggtcagccctgagctggtgtgcagcatgcttcacctctgctccacgcaggggctgccagctctgacggcacacgtgactcaacagaagaatggtggcttctgtgaggtgtgcaagaagctggttagctacttggatcacaacctggagaagaacagcacaaagcaggagatcctggctgctctcgagaaaggctgcagcttcctgcccgacccttacaagaagcagtgtgatgagtttgtgacccagtatgagcccgtgctgattgagatcctggtggaggtgatggacccgtccttcgtgtgcctggaggtgggagcctgcccctcagtccgtaagcctcttctgggaactgagaagtgtgtctggggcccgagctactggtgccagaacatggagacagcagtccagtgcaatgctgtggagcactgcaaacgtcacgtgtggaactag

SEQ ID NO: 23 - DNA, 2899 bp, synthetic construct
  source 1..2899: mol_type = other DNA
atggactgctctggcttggcctggcacccagacatagccactcagttggtgctgtgctcagaggatgatcgtctcccagtgatccagctgtgggacttgcgctttgcctcctcaccgctgatggtactggagagccacggcagggggatcttgtcagtgtcatggagccaggctgacgctgagctgctgctcagtagcgccaaggacaaccagatcttttgctggaatctggggagccgcgaggtagtatataagctacctacacagagcagttggtgctttgatgtgcagtggtgccctcgggaccctccagtgttctctgctgcctcctgtgacggctggatcagtttgtactctgtgatgggtagaagctgggaagttcagcagatgagacaggctgacaagatcttctcttccttcagcaaaggccagcctctcctgccattgcaggtgccagagcaggtagcccaagcaatgctgctatcatccctgaaaaagccccccaaatggctgagaaggccagcaggcgtttcatttgcttttgggggggaagctggttacctttggcctccccagcacccctgcccatcaggtgccacagcctcgcccccacctagtcttcatcagtcaagtaaccacagaatctgaattcctgttgcggtcagctgagctgcaggcagccctgagatcaggaaatctcccgaattattgtcagaacaagatccagcacatgtcactgcagagggaagagatgctctggcagttcctgaaggtgactttagagcaagactccaggatgaaattcctaaagctattaggatacagtaaagatgagttgcagaagaaggtggccacatggttgaagagtaacttggggctgagtgagagccctcagcctgagggaagtgacctcaacagtaccagacaacagaccttctgcagccaggcctccaaatgtaccacagaggaagcttctgcctcctcagccttctttgacgaactggtccctcaggacatgactccatgggagattcccatcagagaagacactgatggactcctgagccaagctctcctgcttggggatctgggccctgctgtggagctgtgtctgaaggaggagtgctttgccgatgctctcatcctggcccaggctgggggtgcagatctgctgaagcaaacacaggagtactacctggccaagaggaaaaccagaatttccttgcttctagcctgtgttgtgcagaagaattggaaggatgtggtgtgtgcctgtagcctgcagaactggaaggaggcgctggccttgctattgacatactcagggccaaaagaattccctgagctctgtgacatgctgggaactcgaatggagcaggagggtggcagggcattaacctccgaagccagactctgttatgtgtgctcagggagtgtggagcggctggtggagtcctggtcaaaatgccaccaggctgcatcccccatggcactgcaggatctgatggagaaggtggtggtcctcaacaggggcttggagctactcttgggtcccgatggggtgacccaaggccctgccacagcccacagtatcactcagtatgccagcctcttggcatcccagggcagcctggccactgccatgagctacctacccagtgactgtgctcaggcaccagtttggcagctgagagatcggctttttcatgcccagggttctagtgtcttggaccaacagtctctcccctttcctttcccctgggttgttgtgggagctacccctcactctaaagagacatcatcttatagattgggatttcagccttctcagaaggtttcaactctatctccaaggccaagagttttcactcctcagtcaccaccagtgatgcccttcatacctccccatcctagcccttatcagggctccaaagcccagaatataagtgactccagggtacctgggccccaggcggcccagcttttgcctctgggctctggggtaaggcccgctctatctcagccgcacttcttaggagggcaaagaacccaagctcctaactctatgggactccctggaatgtggcctcttcctggtccccctccacccatggcatccccagacatcatgcagcctggctctacttccctgcctgagacttctcggctgttccctctgcttcctgtgagaccaccaggtcccagccctatgagctcccagcccccaccccctcctgtgagctcccttgtggcataccctccaggagggctaggtgctccgtactctagtgccctcccaactactggcatcttgacttcttacccagggactcaaaattcctggaaagatgtgccagctcccagggggaacctccagaggaaaaagctgccggagacatttatgcccccagcaccaattactgctccagttatgagcctcacccctgagccacgatggggcctttcctcacagcctcctgttcccgttgtgggtcatgctccccctgcaggagagctcagcctgcagcagcttcagcacctaccacctgagaagatggaaaggaaagagctgcctccagagcatcaatccttgaagaccagttttgaggcacttctacaacgctgctacctgtctgccacggactcaaagacaaaacggaagctgagtgaggcagcccaacgtctagaatgtttgtatgagaagctctgggaggggactctctcacgtcaggttctggctgggctccacgaggtggctcggtgtgtggatacaggaagctttgagcagggccttgtagtgcatgcccaggtggtgggctgcagcagcttcagcgaggtatccagcttcatgcctaccctgaaggctgtcctcaccattgctcagaaactgcagatctaa

SEQ ID NO: 24 - DNA, 1359 bp, synthetic construct
  source 1..1359: mol_type = other DNA
atgtctctccgattttctagcagatccaagcatatttgcttacgacctggaactgggtctgtcagaccacccagtggaggtgctgctggaagtggttttgcctgtgccttgggagggggcttgggcagtgttcctggtgggagccatgttgctggtgcccttggaaatgctgcttgtgttggctttgctggaaatgaaggcagactcctctctgggaatgaaaaggtgaccatgcagaatcttaatgaccgcctggcatcctacctggataacgtgagagctctagaggaggccaatgctgaactagagagaaaaatcaagggttggtatgaaaaatatggtcctagatcttgccatggacttgatcatgactatagccgataccacctaaccattgaggatcttaagaataagattatctcttccactacggctaacgctaacgtccttctgcagattgacaatgccagactggctgctgatgatttccggctgaagtatgaaaacgagctcagccttcaccaaaccgtcgatgcagacatcaacgggctccggcgagtcctggatgagctgacgctctgccggactgaccaggagctgcagttcgagtccctgagtgaggagatgacatatctcaagaacagccatgaggaggaagtgaaggctctgcagtgcgccgctggaggcaacgtgaacgtggagatgaacgcggccccgggggtggacctcaccgtcctgctgaacaacatgcgagctgagtatgaagaccttgcagagcagaaccgcagagatgctggggcctggttcagcgaaaagagtgccattctgcagcagcagatctcggatgatgctggcgcagccacctctgccaggaatgagctgacagaaatgaagcgcagcctgcagaccctggagatccagctgcagtccctcctggcaacgaaacactccctggagtgctccttgaccgagacagaaggcaactactgtgcacagctagcacagatccaggctcagatcggggccctggaagaacagctgcatcaggtcagaaccgagacggagggtcagaaactcgagtacgagcagctgcttgacgtcaaggtccatctggagaaggagatcgagacctactgccgcctgatagatggagatggaaattcatgttccacatcaaagggctttggatcaggaaactcaggggatgcatctaaagatttatccaaaaccacactggtaaagacggtggttgaagagatagatcaacgtggcaaagttctttcatcgagggttcagtctattgaagaaatgacatccaaaatgaccaatggcaagatagaacaaaggattctgttctag

SEQ ID NO: 25 - DNA, 1363 bp, synthetic construct
  source 1..1363: mol_type = other DNA
atggcttccaaatgtctcaaggccagcttctcttccaggtctcttaagggcccaggaggggccattggggtctctacccctgtgtccacgatgtactccagcagctcctgccagctcccgagcctctcctggggggcccggagtttctctgcatgttcgactgggctgggcagaagcagctgcagggccgctagctgcctgcctactcttggcctccccattggaggctttgccactagctacagcctgggtgggagctggttcggggagggtgtcctcaacagcaacgagaaggagaccatgcagttcctgaacgaccgcctggccaactacctggagaaggtgcgccagcttgagcaggagaacaccagcctggaggaccgcatccgtgagtggtgtgagcagcaggtgccctacatgtgcccggactaccagttctacttccgaaccatcgaggagcttcagaagaagaccctgagcaccaaggccgagaacgccaggctggtggtgcagattgacaatgccaagctggctgcagacgacttcaggaccaagtatgagatagagctgtccatgcggcagctggtggaggctgacatcaacggcctgcgcaggattctggatgacctgaccctttgcaaggctgacctagaggcccaggtggagtccctgaaggaggagctgctgtgcctcaagaagaaccatgaggaggaagtgaactcactgcgctgccagcttggtgaccggctcaatgttgaggtggacgctgccccacctgttgatctgaaccgtgtactggatgagatgaggtgccaatatgagaccctggtggagaataaccgccgggatgctgaagactggttcatcacccagactgaggagctgaaccagcaggtggtgtccagagaagctgcagtcctgccaggcagagatcatcgagctgaggcgcacagtcaatgccctggagatcgagctgcaggcccagcacagcttgagagatgcttcggattccaccctggctgagaccgaggcccgctacagcgcccagctggcccagatgcagcacctgatcagcaatgtggaggcccagctggcggagatccgggctgacctggagcggcagaaccaggagtaccaggtgctgctggatgtcagggcccggctggagtgtgagatcaatacctaccggggcctgctggagagcgaggacagcaagctcccctgtaacccatgtgcctccaactcttcaccttccaagtcgggactcccctgtctcccggcggcctcctgtagtcctggcaccacccgaatgagctgcagtccccgccccatttgtgtgccctgcccagggggtcggttctga

SEQ ID NO: 26 - DNA, 1296 bp, synthetic construct
  source 1..1296: mol_type = other DNA
atgccttctgagtgttctcccactcgctgctcttctgagtctggtgccagggcttctgatcacccatctgtttcaacgcgttctatgaaaacgacttgtctccctaacacctgtgctacaaccagatgccagacccccaccttcccatccacgtctcgcttgtcaactggttgcctcacaccatgctactttgctgggagttgtaatattccatgcttggtggggaactgtccttgttgtgaggatggggtgttcaacagcaacgagaaggagacaatgcagttcctgaatgacagactcaccacctatctggagaaggtgcgtggcctggaagaggagaatgcagcactggaatgcaggatacgagaacaatgtgaacaggaaatcccactggtgtgtcctgattatcagtgttactttgacaccattgaagatctccaacaaaagattttgtgcacgaaggcagagaattctagacttgctgtacagcttgacaactgcaaactggctgctgatgactttaggtcaaagtacgagagtgaactgtcccttcgccagctggtagagactgacatcagtggcctgcacaagatcctggatgagctgaccctgtgcagatctgacctggaggcccatgtggagtccctgaaggatgatctcctttgccttaagaaaagccatgaggaggaggtcaacctgcttcttggacagcttggtgaccgactcagtgtggagctagacactgcccccacgaccgacttcaacagggtcctggatgagatgcgttgtcagtatgaaacagtgctcgccaacaaccgcagagacgtggaagcatggttcgctgttcagacagaggagctgaatcagcagcagctgtccagtgcagagcagctgcaaggctgccagacggagatcttagaactgaaacgcacagccaacgctctggagattgagctccaagcccagcaaaacttgacagactctctggaatgcactgtggcagagaccgaggcccagtacagctcccagctggcccagatgcagtgcctgatcgataacgtggagacccaactggccgagatccgctgtgacctggagcggcagaacctggagtatgaggtgctgctggacacaaaggccaggctggagtgtgagatcaacacgtaccagggcctcctggacagtgaggatggcagaattctttgtaaccgtggttctacaacacacacatcaagcaacacctgtgagccgtactcaacctatgtcatgtgcacagttgaaaactgctgtgcttga

SEQ ID NO: 27 - DNA, 5850 bp, synthetic construct
  source 1..5850: mol_type = other DNA
atgagttccgacgcggacatggccgtttttggggaggccgctccttacctccgaaagtctgaaaaggagcgcattgaggctcagaacaagccttttgacgccaagaactctgtctttgtggtggatgctaaggagtcctatgtgaaaagtacagttcagagcagggaaggagggaaagtgacagtaaaaactgaagctggtgctaccctcacagttaaggaagatcaagtcttctccatgaatcctcccaaatatgacaagatcgaggacatggccatgatgactcacctgcacgagcccgctgtgctgtacaacctcaaagagcgctacgcagcctggatgatctacacttactcaggcctcttctgtgtcaccgtcaacccctacaagtggctgccggtgtataaccccgaggtggtgacggcctaccgaggcaagaagcgccaggaggccccaccccacatcttctccatctctgacaacgcctatcagttcatgctgactgatcgtgagaaccagtcaatcctgattaccggagaatccggggcagggaagactgtgaacaccaagcgtgtcatccagtactttgcaacaattgcagttactggggagaaaaagaaggaggaacctggcaaaatgcagcatttcttttactgtctcataatttctcttaaggggacactcgaagatcaaatcatcagtgccaaccccctactggaggcctttggcaatgccaagactgtgagaaatgacaactcttctcgctttggtaaattcatcaggatccattttggcgccacaggcaaactggcttctgcagatattgaaacatatctgctagagaagtctcgagttactttccagctaaaggctgaaagaagctaccatatattttatcagatcatgtccaacaagaaaccagagcttattgaaatgcttctgatcaccaccaatccatatgacttcgcctttgtcagtcaaggtgaaattaccgtgcccagcattgatgaccaggaagaactgatggccacagatagtgctgtggacatcctgggtttcaccgcagatgaaaaggtggccatttacaagctcacaggggctgtaatgcattatgggaacatgaaattcaagcaaaagcaaagagaagagcaagctgagccagatggaactgaagttgctgacaaggcagcctatctccagagtctcaactctgctgacctgctcaaagccctctgctaccctagggtgaaggttggcaatgagttcgtcacaaaaggccagactgtgcaacaggtgtacaacgccgtgggtgccctggccaaagccgtctacgagaagatgtttctgtggatggtgacccgcatcaaccagcagctggacaccaagcagcccaggcagtacttcatcggcgtcttggacattgctggcttcgagatctttgatttcaacagcctggagcagctgtgcatcaacttcaccaacgagaaactgcaacagtttttcaaccaccacatgttcgtgttggagcaggaggagtacaagaaggaaggcatcgagtgggagttcattgacttcgggatggacctggccgcctgcattgagctcatcgagaagcccatgggcatcttctccatcctggaagaggagtgcatgttccccaaggccacagacacctctttcaagaacaagctgtatgaacagcatcttggaaagtccaacaacttccagaagcccaggcttgctaaaggcaaggctgaggcccacttctcgctggtacactacgctggcaccgtggactacaacattgccggctggcttgacaagaacaaggacccactgaatgagaccgtggtcgggctgtaccagaagtctgcactgaagactctggctttcctcttcgctgggggacaaagtgctgaaccagaggctggcagtggtggaaagaaaggtggcaagaagaagggctcttctttccagactgtgtctgctcttttcagggagaatttaaataagctgatgaccaacttgaggagcactcacccccacttcgtgcgctgtctcattcccaatgaaactaaaactcctggtgccatggaacatgaactcgtgctgcaccagctgaggtgtaacggtgtacttgaaggcatccgcatctgcaggaagggattccccagcagaatcctttatgcagacttcaaacagcgatacaaggtactaaatgcaagtgctatcccagagggtcagttcattgacagcaagaaggcttctgagaaacttctagggtctattgacattgaccatacccagtacaaatttggtcataccaaggttttctttaaagctggtctgctgggaactctagaggaaatgcgagatgacaagctggctcaactcatcacacgcactcaagccttgtgcagagggtacctgatgagggtggagttcaagaagatgatggagaggagagagtccatcttctgcatccagtacaatatccgtgccttcatgaacgtcaagcactggccctggatgaagctgtacttcaagatcaagcccctcctcaagagtgcggagaccgagaaggagatggccaccatgaaggaagagtttgagaaaaccaaagaagaactagctaagtcagaggcaaaaaggaaagagctggaagaaaaaatggtagctctgatacaagagaaaaatgacttgcaactccaagttcaatctgaagcagatggcttggctgatgcagaagaaagatgtgaccagctgatcaaaaccaaaatccaacttgaggtcaaaatcaaagagctaactgaaagggcagacgatgaggaagagatcaatgctgagctgactgccaagaagagaaaactggaggatgaatgttcagaactgaagaaagacatagatgaccttgaactgacattggccaaggttgaaaaggagaaacatgccacagagaacaaggtgaaaaacctcacagaggagatggcaggcctggatgaaaccatcgcaaagttgaccaaggagaagaaagccctccaagaggcccaccagcagacgctggatgatcttcaggcagaggaggacaaagtgaacaccctgaccaaggtgaaaaccaagctggaacagcaagtggatgatcttgaaggatctctggaacaagaaaagaaacttcgcatggacttagaaagagcgaagaggaaactggagggtgacctaaaattggcccaagaatccacaatggatatagaaaatgacaaacagcaacttgatgagaaactcaaaaagaaagagtttgaaatgaacaatctgcaaggcaggattgaagatgaacaggtccttggtatgcagctgcagaagaagatcaaggagttacaggcccgcattgaggagctagaggaggaaatcgaggcagagcgggcctcccgggccaaagccgagaagcagcgctctgacctctcccgggaactggaggagatcagtgagcgcctggaagaagctggaggggcgacttccacccagattgagctgaacaagaagcgggaggctgagttccagaaaatgcgcagggacctggaggaggccaccctgcagcatgagaccaccgcggccaccctgaggaagaagcacgcggacagcgtggccgagctcggggagcagatagacaatctgcagagggtcaaacagaagctggagaaggagaagagtgagctgaagatggagattgatgaccttactagtaacatggagactgtctccaaagccaagggaaacctcgagaaaatgtgccacaccttagaggaccagctcagtgaagtgaaatcaaaggaagaagagcatcaacgcttaataaatgagttgtccacccagaaggcacgtttacacacagaatcaggtgaactttcacgacagctagacgagaaagatgctctggtttctcagctatcccgaggtaaacaagcatatatacaacaggtagaagaattaaagaggcagctagaagaagagtctaaggccaagaatgccctggcccatgccctacagtccgctcatcatgactgtgacctgctacgggaacaatatgaagaggagcaggaaggcaaagccgaactgcagagggcaatgtccaaggccaacagtgaggttgcccagtggaggaccaaatacgagacggatgccatccagcgcacagaggagctggaggacgccaagaagaagctggcccagcgtctgcaggatgctgaagagcacgtggaagccgcgatcgccaaatgcgcttcccttgaaaagacgaagcagcggctccagaatgaagtggaggatctcatgctcgatgtggaaagatcgactgccgcctgtgcggctcttgagaagaagcaaagaaactttgacaagattctgtcagactggaaacaaaaatatgaggaaactcaggctgaacttgaagcctcccagaaggagtcccgctctctcagcactgagctgttcaaggtgaagaatgcctatgaggaatccctggaccaacttgaaaccctgaagcgggaaaataagaacttagagcaggagatttctgacctgactgagcaaattgcagagggaggaaagcatattcatgaattggagaaagtaaaaaaacagatcaatcaagagaagagtgaactccaggcggccctagaggaagcggagggatctcttgagcatgaggaaagtaaaattcttcgtatccagctggagttaaatcaggtgaaatctgagattgaccaaaaaattgctgagaaagatgaagaaatcaatcagctgaagaggaaccatctcagagctgtggagtcgatgcagagcacactggatgctgagatcaggagcaggaatgatgccctaaggatcaagaagaagatggagggagacctcaatgaaatggaaatccagctgaaccatgccaaccgccaggctgctgaggcaataaggaacctgagaagcacacaaggaatccttaaagacactcagctacatttggatgatgccattagaggccaagatgaccttaaagagcaactagcaatggctgagcgcagagctaacctgatgcaggctgagactgaagagctaagagcatctctggaacagaccgagaggagcaggaaggtagcagagcaagagcttctggatgccagtgagcgcgtgcaactcctgcacacccagaacaccagcctgctcaacaccaagaagaagctagagacagacatttcccaaatccagggcgagatggaggacgttgtccaggaagctcgcaatgcagaagagaaggccaagaaggccatcactgatgcagccatgatggctgaggagctgaagaaggagcaggacaccagcgcccacctggagcggatgaaaaagaacctggagcagatggcgaaggacctgcagcaccgtctggatgaggctgagcagctggccctgaagggaggcaagaagcagatccagaaactggaggccagggtaagagagcttgaaaatgaggttgaaaatgaacagaagcgcaatgtcgaggctgtcaagggtcttcgcaaacatgagagaagagtaaaggagctcgcttatcaggctgaggaggaccgcaagaatgttctcaggttgcaggacttagtggacaaattacaaaccaaagttaaagtttataagagacaagctgaagaggctgaggaacaatccaacgtcaaccttgccaagttccgcaagctccagcacgagctagaggaggccgaggagcgggctgacattgccgagtcccaggtcaataaactgaggatgaagagccgggaggttcacacaaaagtcaaaagtgaagagtaa

SEQ ID NO: 28 - DNA, 414 bp, synthetic construct
  source 1..414: mol_type = other DNA
atgacaatggaggctctccccaaggccctggaggtcgatgaaaggtctccagaatccaaggatctgctgcccagccagacggccagctctctgtgcatcagctccaggagtgagtctgtctggaccaccacccccaggagtaactgggaaatctaccgcaagcccattgtcatcgtgtccgtgggaggtgccatcctgctctttggtgtggtcatcacctgcttggcctacaccctggacctgggggagaagagcaagaccatcctcaagatgatagggcctgccttcctgtccctgggactcatgatgctggtgtgcgggctggtgtgggtgcccatcatcaaaaagaagcagaagcagagacagaagtctgttttcttccagaacctcaagttctttttcctgaaacgctga

SEQ ID NO: 29 - DNA, 7710 bp, synthetic construct
  source 1..7710: mol_type = other DNA
atgagtgccgtgggcttagtgctcctggaacttgttctgggttttagggccacgactgctgggccagaggaggacagcttttgctctaagagccaggtggccttcagagatgcttgctatgaatttgtacaacttggactcactttccgtggtgcccagggctggtgcgaggggcaaggaggccatttgatcttcgttcgggatgaagccacccagcagtttctgcagaagtgcatctcccaggacagggaatggtggatcgggcttacagggaacttggagccaaatggaaccacagaagggccagaaacttggttggacacctccaatgtgacctacagcaactggggtggagggcaggctgagcctgcccccaacacctgcggctacattgggaaaggccctttgtccgagtgggccacaacagacaactgctcccaagtgttcgccttcatctgtgagtctggtgtcggccagagcctggcctgtgacggcttcaatgccaccatggactgtggctcaggggaggtaatccagatgcaggatgccttctacgggcgccaggccccccactactgtacccaggacactgggcgccccacagacctggaggaggagtgcagctgggtcagtgtgaaggacgaggtggcagggcagtgccaggggctgcaggcatgccaggtggcagcagacagaacctactttggagacctttgccctactctgggcagctacttgtgggtgcagtaccagtgcctggaaggcctccagctgacagtgtccaacgagagtttcatctttaagaacatcaccatctccctgacatggctcctctctcccttcatcggaaatctgtcctgtataattagtatgggagatggacacacttttgatccttactacccccccagtttgtccagcaatgtgatctaccagttcacatctcctggggaattcacagtgtttgctgagtgcacaaccagcgaatggcatgtgacagctcagaagcaagtgacaatccgagacaagatggagaggctcagtgtgactgggtgttccaggctgtccaagtcagagaacagccatctctgtcagactgtctttggggaccctctctggattcaggtggagctcgatggaggaacaggggtgacttacactgtgctgtcaggtaacataaccctgacagagtacaccaccctgaggggtccacttccctacaatctgaccctggacagagaagcccaacaggtgatgggcccagggatgcaccacctggagatccgagccatcagcaacaccaccacctctgcgctctctggcaacatcaccgtctactttatggagccactgtcagggctgcaggcctcctgggcttctgaccatttggaacttggagaggacctactgatcaacatttcagtggctcacggcacccctgaggagctgacctttgaggtgacaggactcaatgcaaacttttcccaggaagaagagagctttggggaatcattcgggatttaccatgtggcagttcctgctgaaggcaccttcctggtcaccgtgctggtgaggaatgccttctccaacttgagtttggtaatcggaagcatcactgtctcagctcctctcaatcttcaagaaccatctgaaacaaatgctgaggaaaaggatgaagagagagggcaaatcaaggtatacgttgaacctggtcaatacgtggatcctttcatgacagtgactctgagctggccagacaatgacaagaatttacacttccaatggtcatgcgggcgttgctgggctcagtggagcgactgtgttcagaggcagctacttcgcacagaccagagggagttggtggtcccacccttctgcctgccgccaccaaactctgctgtcacccttaatttggctgtctggagaggccagaagctggaggacagggaggagcagtgcctatacatgtctgcacccctagaactcaggcctcaagtcagctgtgagcagaattgcaggccagtgagtgctgacgaagacattgtgctccgggtcacaatgggaggtaatacctctgtggccacattcagctggtatttagatgacacctcactggagaaggctgaggccctccctgcgcctgcacactcagaggattttggccaagttctctaactctccttcagagcaacacctccatgctgcgactgaatagctccttcctgccaacttcgggagagggcatccgtgtcagagccacagcactgtccaggcacgcctacggtcaggacacctatgtgatcagcaccctgcctccccctgaggtgccagcctgcatcatcaccccagaggagggcaccatcctgacgagcttcgccgtcttgtgcaatgcctccacagccccagacccactggagtactgcttctgtctggaatcaggttcctgcctacactgtggccctgagccagccctcccatcagtttatctgccacttggaaaggaaaacaacgactttgtgctgacagtggtcatttctgtcaccaaccgtgcaggcagcaggcagcagactcatgtcatagttaaggtgggccttggagacacacgtgtggaggatgcagtgttccagtcttcagtgttggaaaccattacctctgctctggaaggggagcatagccctgagcagctcctccagctgaccaagtctgtgtcctctgtgctgaaccaggagtacctagggaacagctttgggaagctgctggaaatggacaccagaaaaaaggtcagagagtatgtgctggggtctctgtctgccgtcgccacaaccctggaagagattcagacggtgcagaggctggctgaaatgctgagagaggtgacctaccacagtgaggagctcacacccttggcccagtgggaggctagccaggctcttcagcatgccagtgaggccctgttgtcagtgagtgccagggcccatcctgaggaccagagatgccaggcagctaccaaggacctgtttcaggctgtgggcagcgtgttggaggcttctctgagtgatagaccagaagagcccccagaggccaacagcagccagactgccacagtgccacagctgcttcgtgttgtagggcatgtgcagacagcccttctgcaggggagactgcctgggggcctgccagccacgctggccaccccctccatctctgtgtacacaaacagaatacagccacggagttggcaaggcccctctgtgcatgttgctcctgctaactctgtgaccttcactctgcctgttgcctcctccctcagctctatggcagacagccatgagcctgtggacatacggatgatgagtttcccaaggagccccttcccagcccatagccgctttgatgtcagtgggactgttggtggcctctgtctgaccagccctagtggagagctcatacctgtgaagaatctgccggagaatatcgagatcctgctgccccggctttgggagggacatggagagccgactgtgttgaacctgagcagccctgaaactttacgggtgaacctgacttcacgggaggcagctttggggatacatctgcactggagacctagaatcccactcatgctcagcctgggctatggctactgccctaacgagaccagctacgatgccaaaactcactttccgccaatagctgatccagacggactgtccacatggatcctgagcccagaggacctgcattttggagaaggtgtctactattttactgtggtccctgcctgtgacctgaagctgactgtcatcagggacctcacagttggcatcaccaccttcctgtcccattgtgtgttctgggatgaggtccaggaaacttgggacagctctgggtgccaggtggggccacggaccaccccctcccagacacactgcctctgcaaccacctcaccttctttggaagcacattcctggtgatgcccaatgccgtcgatgtctaccagactgctgagctctttgccacctttgaagacaacccagtggtcgtgactacagttggctgcctctgtgtggcctatgtgctggtggtgatgtgggtgaggaggaaggacgctcaggatcaggccaaggtgaaggtcacagtgctggaggacaatgatccctttgcccagtaccactatctggtgacagtctacactggacatcggcggggggcagccacctcctcaaaggtgacggtcactctgtatggcttggatggagacagtgagccccaccacctggcagaccctgacaccccggtttttgagcgaggaggaatggatgtcttcttgctctccaccctgttccccctgggggaactgcacagcctcaggttgtggcatgacaactcaggggaacagccgtcctggtatgtgagccaggtgttggtccatgatctggcaatggaccagaagtggcatttcctctgcaactcttggctgtccattgatgttggggactgcatcctcgacaaggtgtttccagtggccacggagcaggacaggaaacaatttagctacctgttctccatgaagacttcctctggcttccaggatgggcacatttggtattccatcttcagccgctccccctggagcaacttcacatgcatccagagggtgtcctgctgcttctccctgctcctctgcaccatgctgaccagcatcatgttctggggtgtccccaaggacccagccgagcaaaagatggacctgggcaaaattgaattcacttggcaggaagtgatgattgggctggagagctcgctcctcatgttccccatcaacctactgatcgttcagatctttagaaatacccgtccttgggccaccaaggagcaaaagactgggaaatggggctgggggtcttccggcctgctcccctccccaaaaccagtagaagatggtcttctgacccctgaagcagtgtcgcaggatatgtggcgacttgtcagctcactgtttaaagctctcaaggtaccatcccctgcctcaggctgggactcggcaaacttgatggacatcaacaaacttctggccttggtggaagacgtcatttgtcctcagaacacagcaggacaggtgtttggtgaggaagctaaaaaaagagaggaccctttaaccctcacccgtggttccatacatgtcaaagagaaaacacagtgccccatgcccgaggtgtccttggctggctctcagaaggacagtgcctacaggcagtgtctctacctccagctggagcacgtcgaacacgagctgcagctgctagggccccatggcttcccccagcaccagagccatacccaggccctcaggcagctacagatcctgaagggctgcctggggggacagccaggcacctcaggcccagcatatcccagctccctgccaatgaggaggccccctcgtggcctgccctggtggtgcctcctggtgggctggctcctggtggctgccaccagtggtgtggcagccttcttcaccatgctctatggcctgcactatgggcatgccagctcccttaagtggctcatctctatggtggtctcctttgtggaaagcgtgttcgtcacccagcccctgaaagtgctggggttcgctgctttctttgcactggtgttgaagagagtagaggacgaagaggagcctgtggcctccgcggcacaacctctgtctagcccagatccctatgccttgttcccagcacaaagaaacagcagaagggacatctaccagccgcctcttagcactgatgttgagaagatgaaaatcacccaccttaaggaacagagagcatttgccctaatcagagaaatcttggcatacctgggcttcctgtggatgctgctaatggtggcctatggacagagagaccccagcgcctaccacttcaacagacaccttcaacacagcttcacccagggcttttcagacgtgctgagcttccaggagttcttcacatgggtgaacaccaccctcataaacaacctgtacagtcaccacccaggctttatcactgatgggaactccaagctggttggcagtgcccagattcgccaagtgagagtccggaaaagctcttgtcctcttgctgagcagctgcagacttcttttgatggctgccaggcaccatattccctggatgttgaagacctgtcagactatggggaaggctggaatgcctccgcccccaatagcagcaatggctttccccaggcttggcagtaccagagccagagccagcgccaagggtatcccatctggggcaaactcactgtgtacaggggaggaggctacgcagtccccttggggactgatcaccaaagtgcttcaagaatactccagtatctcttcgacaacacctggctggacaccctgaccagagctctgtttgtggagttcactgtctacaatgccaatgtcaacctgttctgcatcgtcactttgaccctggagaccaacgccctgggaactttttttgcacatgcggacctgcagagcttccgcctgtaccccttcaccaatggctggcacccctttgtggtggcagcagaggtcctctacttcctcttcctcctctactacatggtggtgcagggcaagctcatgaggaagcagaaatggtgctatttctgcagcaagtggaatcttctggagctggccatcatcctggtcagctggagtgccctggcggtgtttgtaaagagggctgtcctggcggagcgtgacatccagcactaccggggccacagggaggaggggatcagttttagtgaaacggcagcagctgacgctgcccttggctacatcattgccttcttggtactcctgtccacattgaagctatggcatctgctcaggctgaatcccaaaatgaacatgattgcatcggccttgtgccgcgcccgggggggacatctcaggctttatcatcgtcatccttatcatgctcctggcttattccatcacgtcacacttaatatttggttggaaacttgtttcctacaaaacactctttgacgcggtggaaacaatcatcagccttcagctgggaatcttcaactaccaggaggttctggacgatagcccagtgcttggctccttcctggttgggtcctgcattgtgttcatgacattcgtggtattgaatctatttatctctgttatcctggtggccttcagtgaggagcaaaaatatcatcagctgtcagaggaaggagagattgctgatttgctgctgatgaaaatactcagtttcctgggcattagatgtaaaagagaggcgcctcaaagcagcactgagaagtctggggagctgacagaagctgggccccctcaaccagcacacgctgcgcctaagggtggccctaggccagggccccgcccctggacgctaagccccgccccgagcggcctcgcccggccccccgtctcgcgcttgccccgccccccgcccgtcgcctcacccgggcctcaggccccgccccatgtgcacggccccccgcacatcgccctatccgggaccgctcccggccccggagtccgcgcccctcgcgtacggacctatcggcctcagcccgccgggtcccgccccgcgcggcgatccagccggctcgttccagccaggggccgcgtcgccccgccccgccccgccccgccgccgggagcctga

SEQ ID NO: 30 - DNA, 5499 bp, synthetic construct
  source 1..5499: mol_type = other DNA
atgaacagcaccccgcaggatgcccaggccccgagataccatgagttcctcctcccttctgtggctcggacctcctctatcacccaggtcacgccagccaagaagataaccttcttcaagcgaggggatccccgattttctggggtccggctagcagttcaccagcgagtcttcaagaatttcagcgccctgatggatgagctttctcagcgcatgcctctttccttcggggtgcgctctgtcaccacgccccagggactgcactgcctcagcaccctggagcagctagaagatggcggctgctacctctgctctgacaagaagccgccccaagctcgcagtgggcctggcgggcaacaagggacagacccctctgctcagccatcaggggatttggaaggctggtatgaggtcccaggaacaccatcttcctggaagggccctaaagccccaaggaggataatgctggttaagaacacggaccctagattccagcggacagtggttctcagtcatagaaacactaggagccttaaggcctttatcagcaaagcctcagatcttctgcaatttcccgtgaaacaggtgttcaccatcagtgggaaaaaggtggactccctgcagagtttgctacacagccccttagtgctggtatgtgctggtcatgagtccttcagaccacctgcaatggaagaatctagaagaaatggtactgaaactttacctgggctgacttcaaggaataaaaatgggagctggggactgaaggccaagcagagcgttatccactcaaggtccaagtcagatggcaggttgcggcagttctccttgctatcagagaggtctggtatcagtgacccccctgtgtccccacattgcacctggatgggccctgcccttcacaggcaccctcagaacacaccagtccacctttgccccttggtggctgatgatgactttgagaagaaggtccacatgaatgaagatggcagcctgtctgtggagatgaaagtccgtttccacctgctcagcaaggacatgctcctgtggtccaggggcgccaggaaggccagcaccctcacaacacccagtgaggagtgccctgtcctgggggaggtggatcccctacattgcgtgttggaaggcagccctgggggcttctcagagcctggggcaccaggattgaggcattgcgagtcagggggtgaggaggcttttaaccaaggtcagcaggcaggtcctggctatcagatctggacaaaccccgtgtacaggacccagggagaagaaacagattcttggaggagggccctgctcactaagcactgccactccacagcttcctggagccaaggagttgccagtgggaaaaggaccagtaagatcagtgttagcttggcctccaatgacagacccacagcaggctctgaggcaaactcctcttactgccccaggacaccggaaggcagcgtgggcagctgcagtgggcatcaggctgccagggctgcctccaagacagaagttgagcaggaggctggctgcacccaccaggctggtggggacccaaacctgggacccaaactatgtcaaaaaggaggaggggagggtggcagggaacaagaagcccaagaggagggaagtaaagagccttcactgggctgcctgaaacctgagccctgcagcctggaggttactcttcctgatttgtcagcaagtgctagttttctcaagaggtctggtgaaacaggtgagccatgctggggctgtgcaagcagtgagggaaccatgatttcacagcaggagcacacccaggaaggcagcaccaattgccctcctttgagtccctcatctttgaagaatggagacctacaggcaaaagagtgtggacagggcactgggggccataaggccagggatgggtctgtgacaaggctgcccgtggctttggaccattctagctcatggtatgctggtgggtgctcttccccactttcctcctgtacctcagcccagaggaggagtagaaagcagaagagccaagctagtgcgatgtcctcacccaacacttcagactttggcagcatttctcagagaagccaccacaggcagcaccaccaccaaagggttgtcccctactcattggacttgcccacaaccaaacaagtattgagtcctgctaatacaggagggtcctgctcaggtggcccagaactaggttttcctgaaagctcatctagtgtcaggaaacaggcttccaaggacccaggatctccctcctctggctctctttgttcccagtccacaccaggggtcagcagtgctgccattatacttgttatgtgcagcaggtactgccccacacccccaaggggacaaccttgcatcaagaaacactcttcaagcagtagcagcaatagcaatagcaaccaaagtgccaaccgggggtcaggtggaggggaaagccttgaggagcaagaggaagatggtggcatgatgcctagtgctctgccccacatttcaccagaagctgtcatctgtgaatggctgagccacatcccagaagagcccatactcatgaaatatgagatgatggatgagagcccaaatgtggctggggatggcccagaaggcacccaggaggaccctgttgacaaacattctctggaaggccttggggagttagctcgggtcagagagcagcccctggaaggggagaccagtgagaaaccagaactagatagatcctcagtgactgatgatgctattcccaaatcaaaagaggcttttcctcaaagaggagcttccaggggtgtttcagatgcttgtgagaaggacagagccagtgatagaaccactgtgggccgtggtgtaagtgagggtatcctgcctagcaggatacctgcctccatacagatcatgaaggaattaatcagctcaaagcagggcaggcccagcagcctgcctgaagtgtctggtgtggtggggaggaggctcagccactctgcctgtgctcttgtcacatgtctcaccaggcttcacttctttgatgaacaccttgggtcttctgccagcaaaatgaggttcatagactcccctaagttccaagagctcctggtcactctccagtccctgtggccacagtgtgaccttgggaaagacaagttggacttgggccttcaggaacttggatcgtgccagggtctgccaggtttcacatcccatgctgtgaccgaggatttcactccaacatcctcctcaggagtggatgtcagcagtggttccagagggtcaagggagggcagtgggccttgccctgtggactgtgccctgagccctgagaggatggagctgcccttgaaaatggtgacaagcagcatctctgatcagaggcctgactctagagcttcagagaacccagaggatccgagaaaccaacacctgagctgttccaaagcctcctcaaactcccaagcttgggcttgtgccacaaaccaggatgaagcaggagaaaacagcagggaacagatgttgggcaatagcctagaacagttagttgaaaatacaatgcaggaagaggggatacaagtagagaaaacacaagaagaaatagaaaaagaagaaatgcaagaagaacataataaagaggaagagtttccagaaacggaaagagtcaataaacaggaattgtcagtggacagcactgaggatggagagggcacacaggaagatacaagaatgcagaaagaggaaacaggaagagaccctgactctgtaggcctgtgtcctccaggaatgagtgataaaccaaaagagctcttcagtaaccccagtgagtgtgactctcatgccagtgaacatcaaagtggccccacgtttgattatggtttgaaaaagctgcccagaaatgctgagatggcaggtggacaaactcaggtcaactctactcaggggccaggggtgaaaagtagctccaaggcccacagagggttcctggatcttgaccccatctgggtgttcaagttgttgaaaaagatggagaaggccttcatgacccactttgttagtgccacagccatggttcgagcccactggggtctgcagaacaatgatttgctggaccagatggtggcagaactggagcagaacgtgggctggcggctccaagacagcattaagagggagctcaggaagatccagatcagggccagaaggaaagcggccaggccactgcggtgggagatgtcgatgcagacagaacagcggagacgccgcctccagggcctgcgcaacctctctgccttcacggagcagacccgagcccatgggctcttctccctcaccctggaagatgagccaaccgttagtggtgcccagagaaatgagctgggtgggaaggccaagggggaggagttttgcccctgcaaggcctgcatgaggaagaaagtgagccccataccctcgagggacacaatgggagcaggcagcgcacccatcaaaaaggcctttgacctgcagcagattctgcagaagaggaagggaggacctattaatggggaggcagtagaggaagctcctgaggagggagggatggggctgcttcaggtggcctccttgaggaccagatctgtccagggagtttatggagagctggagccaggattaggccttagttctggggcagatgagggagatgagatcgaagggaaacagaaactcagtggagatgaagatcctgaactaggagaaggagagggggctagttatcaggagggagaggaagacacagatactcagaagagagacaggaaaacaggtatcagtgttggcaacaacctggagaaagaagaatgggaggagcagcatgtgggtgagcaggaagaaaacatgaatgaagactctgggaatgaggataatttgaaggacaaagcatcaggaagaggtaatcgaggtccaggaggagatgttgatggtacagatgctattaaggcccagaaagctgaaggagagggacagacagagttgggagatgagaaagaaggtagcccaccagttagccaaggagaggtgcagttgggtaaggcttctgaaaacagctgtccagaccaagaggggaagcttgcatctcctgctgccccaagtggagacaccccctaccaaagatcagcctccaaaacagtcaactcctcctctagcatgtcatctttaggaaactgctctcaggtctctcagaaaggttcagaagaagagcatcccaatggagacacaaggagcattgcagatgagcccaagggaatcactcatcaagaaagaaaagtcaccaggatgtacttcaaaagctccacctctgagggagaaggagccccttcaggcccaagcactccagaccagggggcagatgacgaccctgacttagaagataggaagatagttaaaagcctcacttttaccaaggtggtagacagggcagatgaatttggccaagatgatttagatttctag

SEQ ID NO: 31 - DNA, 6882 bp, synthetic construct
  source 1..6882: mol_type = other DNA
atggattcttcctcagatccaccaggtactagtgttccaaaatcagataaccaatgctcagaaaagggccagaaaacaaccgtggaaattctaaggaaaatgagttcttcttcggatccaccaggtactagtgttccaaaatcggataaccaagagtcagaaaacgaccagaaaactgtggaaattctaaggaaaatgagttgttcttcgcatccaccaggtactagtgttccaaaatcagataaccaagagtcagaaaacaaccagaaaactgtggaaattctaaggaaaatgagttcttcttcagatccaccaggtactagtgttctaaaatcagaaaaccaacattcagaaagaggccagaaaaaaactgtgaaacatctaaggaaaatgagttctttctcaggtccaccaggtgctagtgttccaaaatcagataaccaacactcagaaagaggccagaaaacaactgtgaaacatctaaggaaaattagttcttcctcaggtccaccaggtactagtgttccaaaatcagataaccaacactcggaagaaggacagaaaaaaactgtggaaatgctaaggaaaatgagttcttcctcagattcaccaggtactgatgttccaaaatcagataaccgacactcagaaaaagatcaggaaacagctgtggaaattgtaaggaaaatgagttcttcctcagatcagcaaggtaccagtgttccaaagtcagataaccaacactcagaaaaagagcagaaaacaactgtggaaattctaaggaaaatgagttcttcttcagatcaaccgggtactagtgttacaaaatcagataagcaatactcagagagaagccagaaaacaactgtgaaacatctaaggaaaatgagttcttcctcaggtccaccaggtactagtgttccaaaatcagaaaaccaacactcagaaaaagaccaggaaacaactgtgaaaaatctaagggaaatgagttcttcagacccaccaggtactgatgttccaaaatcagataaccaatactcagaaagaggccagaaaacaactgtgaaacatctaaggaaaatgagttcttcctcaggtccaccaggtactagtgttccaaaatcagataaccaatactcagaaagaggccagaaaacaactgtgaaatatctaaggaaaatgagttcttcctcaggtccaccaggtactagtgttccaaaatcagaaaaccaacactcagaaaaagaccaggaaacaactgtgaaaaatctaaggaaaatgagttcttcagacccaccaggtactgatgttccaaaatcagataaccaacactcagaaaaagaccaggaaacaactgtggaaattctaaggaaaataagttcctcagattcaccaggaactagtgtttcaaaattagataaccaacactcaggaaaagaccaggaaacaactgtggaaattctaaggaaaatgagttcttcctcagatccaccaggtaccagtgttccaaagtcagataaccaacactcagaaaaagagcagaaaacaactgcagaaattctaaggaaaatgagttcttcctcagatcaaccaggtactagtgttccaaaatcagataagcaacactcagagagaagccagaaaacaactgtgaaacatctaaggaaaatgagttcttcctcaggtccaccaggtactagtgttccaaaatcagataaccaacactcaggaaaagaccaggaaagaactgtgaaaaatctaaggaaaatgaggtcttcagacccaccaggtactgatgttccaaaatcagatagccaaaactcagaaaaagaccaggaaacaactgtggaaattctaaggaaaatgagttcttcctcagatcaaccaggtactagtgttccaaaatcagataagcaacactcagaaagaggccagaaaacgactgtgaaacatctaaggaaaatgagttcttcttcagattcaccaagtacccgtgttccaaaatcagataaccaacgttcggaaaaagaccaggaaacaactgtggaaattctaaggaaaataagttcttcttcggacccaccaggtattagtgttctaaaatcagataagcaacactcagaaagaagccagaaaatgactgtgaaacatctaaggaaaatgagttcttcctcaggtccaccaggtactagtgttccaaaatcagataaccaacactcagaaagaggccagaaaacaactgtgaagcatctaaggaaaatgagttcttcctcaggtccaccaggtactagtgttccaaaatcagataaccaacacccagaaaaagaccggaaaagaactgtgaaaaatctaaggaaaatgagttcttcagatacaccaggtactagtgttctaaaatcagataaccaacactcagaaaaagaccaggaaacaactgtggaaattctaagaaaaatgagttcctcagattcaccaggtagtagtgtttcaaaatttgatgaccaaaactcagaaaaagatgaggaaacaactgtggaaattctaaggaaaatgagttcttcctcaggtccaccaggtaccagtgttccaaaatcagataacgaatactcagaaaaagaccaggaaacaactgtggaaattctaaggaaaatgagttcttcagattcaccaggaattagtgtttcaaaatcagataaccaaaactcagaaaaagaccaggaatcaactgtggaaattctaaggaaaataagttcttcttcagacccaccaggtattagtgttccaaaatcagataagcaacactcagaaagaggccagaaaacgactgtgaaacatctaaggaaaatgagttcttcttcagattcaccaagtactagtcttccaaaatcagataaccaagactcagaaagaggccagaaaacaactgtgaagcatctaaggaaaatgagttcttcctcaggttcaccaggtactagtattccaaaatcagataaccaacactcagaaacataccagaaaaggactgtgaaaaatctaaggaaaatgagttcttcttcagatataccaggtactagtgttccaaaatcagataaccaatactcagaaaaagaccaggaaacaactgtggaaattctaaggaaaatgagttcctcagattcaccaggtgttagtctttcaaacgtagatgtccaacactcagaagaagaccaggaaacaactatggaaattttaaggaaagtaagttcttcttcagatccaccaggtactagtgttccaaagtcagataagcaacactcagaaagaagccagaaaagagctatgaaacatctaaggaaaatgagttcttcctcaggtccactaggtactagtgttccaaaatcagataacgaacactcagaaagaggccagaaaaaaactgtgaaatatctacggaaaatgagttcttcttcaggtccaccaggtactagtgttccaaaatcagattaccaacactcagaaaaagaccagaaaagaactgtgaaaaatctgaggaagatgagttcttcagacccaccagatactgatgttcgaaaatcagataaccaacactcagaaagagaccaggaaacaactgtggaaattctaaggaaaatgaattcctcagattcaccaggtactactgtttcaaaattcgatgaccaacactcagaaaaagaccaggaaacaactgcagaaattctaaggaaaatgagttctccctcaggtccaccaggtaccagtgttccaaaatcagataaccaatactcagaaaaagaccaggaaacaactgtggaaattctaaggaaaataagttcctcagattcaccagatactagcgtttcaaaaatagataaccaacactcagaaaaagaccaggaaacgactgtggaaattctaaggaaaatgagttcttcctccagtctaccaggtacctgtgttccaaaatcagataaccaatgctcagaaaaagaccagataacaactgtggaaattctgaggaaaatgagttcctcagattcgccaggtactagtgttccaaaatcagatcaccaacactcagaaagaggccagaaaacaactgtgaaacatttaaggaaaatgagttcttcctcaggtccaccaggtactagtgttccaaaatcagataaccaacactcagaaagaggccagaaaacaactgtgaaacatctaaggaaaatgagttcttcctcaggtccaccaggtactagtgttccaaaatcagatcaccagcactcagaaagaggccagaaaacaactgtgaaatatctaaggaaaatgagttcttcttcaggtctaccaggtactagtgttgcaaaatcagataaccaacactcagaaaaagaccagaaaagaactgtgaaaaatctcaggaaaatgagttcttcagacccatcaggtactgatgttccaaaatcagataaccaacactcagaaaaagaccaggaaacaactgtgaaaattctaaggaaaatgagttcttcctcaggtccaccaggtaccagtgttccaaaatcagataaccaatactcagaaaaagaccaggacacaactgtggaaattctaaggaaaatgagttcttcttcagatcaaccaggaactagtgtttcaaaatcagataaccaacactcagaaaaagaccaggaaacaactgtggaaattctaaggagaatgagttcctcagattcaccaggcactagtatttcaaaatctgatgaccaacactcagaccaggaaacaactgtggaaattctaaggaaaatgagttcttcctcagatcgatcaggtaccattgttccaaaatcagataaccaacactcagaagaagaccaggaaacaactgtggaaattctaaggaaaatgagttcttcttcagatcaaccaggtaccagtgttccaatatcagatatccaacacttggaaaaagaccaggaaacaactgtggaagttctaaggaaaatgagttcttcctcagatcagccaggtactagtattccaaaatcagataaccaatactcagaaaaagaccaagaaacacctgaggaaattctaaggaaaatgagttcttcctcagatcagccaggtaccggtgttccaaaattagataacgaacagtcagaaaaagaccagaaaacaactgtggaaattctgaggaaaatgagttcctcagattcgccaggtactagtgttccaaaatcagaccaccaacactcagaaagaggccaggaaacaactatgaaacatctaaggaaaatgagttcttcctcaggtccaccaggtactagggttccaaaatcagataaccaacactcagaaagaggccagaaaacaactgtgaaatatctaaggaaaatgagttcttcctcaggtccaccaggtactagtgttccaaaatcagagcaccaagactcagaaagaggccggaaaacaactgtagaaatgctaagaaaaatgagttctacatcaggtcctccaggtactcgtgttccaaaatcagacaaccaacagtcagtaatagaccagaaaacaactgtgaaatacctaaggaaaatgagctcttcctcaattccaccaggtactggtgttccaaaatcagatcaccaacactcattaaagggccagcaaacaactgtgaaaaatctaaggaaaatgagttcttcctcagatctaccaggtactggtgttccaagatcagatcaccaacgcttaagaaaaggcaaggaaacaaatgtgaaaaatttaaagaaaatgagttcttcctcagttccaccagttactgatgttccaaaatcagataaccaagttttagaaaaaggccagaaaacaaatgcgcaagatgtgaagaagacaaaagtaaataaagatattgcagctcaaataattcagtatgcatggttttcttacgtgcgaagaacagtgtttcaactcctaaaacacacaatttgtgcagcggaacatcatgtgacgtatgacatactaaagaaagtgaaccccttagaggctcagctgattaaagatccttgcatgaagtgtaaggtcagattcagatttagtggtgagaattttccacctttcatcgtgtttaaaatttttctccataccgaaggtcatggttacaagtatattaacggaaaaaccataatgaagccatcaagtgaggcagtggttgatgcttgcaaaataatggggaaaaagaaatttattggccaagttttggaagatgaatatcttttccagaagttcagagtagctgatgtaatagacgttgtcacaatgagagattacgtgcaatataccagtctaatggatgagattcctgcatgttttggtggcagaagtaaccattggagaagattaaacctcgaaaacttgcccagggcaatgatgatatatgatatagttgattatgcacagtctggaataatctcaagccgtctacagaaagaaatgaaatatctatcacagagaccaaaaacagaagagatgcgtgagcaccagctacggattatttctgaagttaggcccccttcacccaagcctttgtatcggccctataaaaaacaaagtcaagtgaaacatctgggtcgtcgatccaaacaagctagaattaaagttgaaaaaatgagaaaagcttataagatggataaagaaaaaaatgattctccggtgaccgaaccgaaaacggacacaccacatacaaagaaacaggagatcatcgtctccacaccatctttcgacatcgtaagagttcaagaatccacgtcagatgaagaatgggaaaaaggagaaaaggaattatttgcctggtctgaagacttgtgtcttgctaatttcccactaccctaa

SEQ ID NO: 32 - DNA, 3909 bp, synthetic construct
  source 1..3909: mol_type = other DNA
acgccaggtacctttctgctagctctggtctcctcccgctgctatggacccctcctgctgcccaccacagcatccaggggacctggcctggacgccaggcctcttcctgctggttctggacacatcccgtcctctctggacccctggcaccacccgccgttgccccagggaaccgagacccgacactcgactccttcctgcctgctccatacctttcctgaggccacttggcaccaaggacccaatcccgaccccaaacccctcccaccagctctagaccccctcctgctgcagccacagtccccaggacacccggtccggtcttctggcccctttctgctggctctgaaccccacccgccacctgccgaggcctggagggaatccggccgggaccccaggtcccttcgcgctgaggaacccaggggacactgctcagaccacagccccttccctccggctctgggcaactcctatcactgcccaaggccctagggggactctgcccagaccccaagatgcttcctgccagctctggacctctcctgctgctccccaaggccccaaggagacccatccgggaccccaggccccttctgctggcttcagacccatccagccgcctgccatggcacccagaggaaatggcccagaccacagtccccttccggctggcttcggacccatcctgcttcttgctgcgacaaccagggtaccccaccaggatcccagaccccctcccacatcctccgaacccgtcccgcaggctccagacccctcacgctgccctccatggcaatctggggacccggttctgaactcaggccccttcttgctgcctccaaaccacttctgccactgccgagaaccgcgagggaaccctgctcagatgcccaggtccctttttgctggctctggactcctcaccctacctcttgacccctcctaccacccaccacagcacccacgggacccagcccgtaccccaggctccttccccctggctccggacacctcccgccaccggtcgctgcatccaggggacccagaccggaccacagccccattcccgccggctctggacccctcccaccttcttcggacccctcccaatgccccccacagccctcagggtaccagccgggaccctaggccacttccccctggctccagtccctcccaccagccaccagctgcctcggccccaagactacccagcccggacccaggctccttctgtcagctccagacctctccagtcactcactacaacaccaaggagactggggttggacaacaggacttttccctctggctccagacaactaccagtgctatccccgtccccaagagaacccaacccggaccccaggcctcttccccctctctccagatacctggtgccacccttcagcccccaagggaccaggtccagaccaaggccccttcccttgtctctggtacttcctgccacctgctgtggctcccagggtacccggcctggatctcaggtcccttcccagagtctccagacccctcccgcggccacccatgtacactgggggacctggcccagaccccaagctcagtcctgccagctccggacccatcccaccacccaccaaagcacccaagagaactggccggatgcagacggagggggggactcagcctggacccctggctcatccctgcagggtccgaacccctcccaccatccatccaaggggcccggccagaaacccaggcccctattatccgactccgaacccctaccggtaatgcacgtggcactcttgggacctggccgggacgcaaacctttcctgctaattctggacccctcttgctgccagccacgacccccagaagagcagaacctgactccaggctcatttctgctggctccagatctcttccgcctacgactatggcccctaggttacctggctgggacccaggcctcttctgctgctccagacccatccagtcacccaccactgcaccctagggagccaggggaccccaggagccttcctgtccactccagacccctctcatcgcagcccggggcccataggaacccggccaaaatcctagaccccttctgccgcctctggacacctcccaacacccgccgcgacactcaggggaccaggcttggacgccaggccccttctctgctgctctgggtcccttccgcctgctgcagaaccctcccgccactaacagtggaccctagggaaccaggcccaaactctccgcgcatttccactggctccgcttccttgctacccaccgtggtcaccaggggatccagccctgaccccaggtcccttccccctggctccagacccctcttgccgctgcctgtggacccgagggtctcttcccgctggctccagacccctcaagccgctgcccatggacccaagggtacctggcccggaacccaggctcagtctcacaggcattgggctcctcccgctacccaccgcgccacccaaggggcccagcctctcctcgcaggctctggacccctaccgctgcagcccggggccgcgaagggacacatctcagatcccaggcctcttccgctggctcctgacccctccagtcatgtgtcgaggcacccaggggacatggaccagaccacagtccccttccttccttctccggacaacttccgccaccactctcggcacaaggagacctggcctggactccaggacccttgcgatggctctggacccctccagccatgtgctgcagcaccgagaggacaaggcccagaccacggtccgcttccctgcggctccggacaactccagccgctgcccaaggccctgagggacccatcccggaccctagacccacctcggaccccagaccccttctgccgcttgccgctgcccccagagggccacgcctggacccaaggccccttcccacctgctccagtctctcctgcaactcattttggcaacaaggggacccggcccagatcccaggccccttcctgctgcccgccgcagccgccagagtccccgactgaggctacccggcccggacccaggcgccttctgccagctccagacctctccagctacccactgcggcaccaaggggacccgacccggacctcagggcccttgctgctagctccagaccccttctgccaccgaaatgacacagaccccaggctcagtctggccagctccagacccatcccgcgacccaccgcggcacccaagggacacagcccagaacccaggcccccactaaccggctccgaacccttcccaacaacggcctccacgcccaggggaccctgccccgaccccagaccccttcgtgccagctctgggccccttctcccttctccacagccctcccgcttcctgccacagtcctcaagggaccaggcctggaacgcaggccctttttctctgcctatgattcttccagccatccaacgcagcccccagaatgcctggcctgttctcctagcccctttgggccggcttcggttccctaccgctgctcaccatagcacccagaccacagtgacactcaaggacctggccccaaccctagacccctttctgccagctccggacccctcccaccacttctgtgccacccaccccagtcccaaagggaccacccctggacctcaggccccttctcactggctctgggccctcctgtccccacggtggcacccaggatacctggcccagtgcccagatgccttccagctggatccagactcctcctgccatccactgcagcacctatggacccaacccacatccagtagctgcccgcagccaaaacgggatactgcccgaaccccagacccctttctgttggctttggacacctcccactgctgccgtgggccctaa

SEQ ID NO: 33 - DNA, 1350 bp, synthetic construct
  source 1..1350: mol_type = other DNA
atgttggtaattggcacaatggaagaagttggaatttatgggctagctgtgaaagcaaatatgttgtgtaactctcaatcagataatattcgtcattgtcaagactcaagttgtggtagcacagataacaaacattcattggacaaaaatgaagacattacatttgtaacaaagaataggaatttggtgagcccaagagaggaaacctctgtccagcatgctcaagcggatatccctgatggtcggcaggtttcagagcacaacagcaacaaagaaaaaacttttggaaaagaagttttcttattaatgcaagccctaaacaccctttcaactccagaggagaagctcgcagctctctgtaagaaatatgccgatcttttggaggaaagcaggaataatcagaagcaaatgaggattctgcagaagaagcaagctgagattgtgaaagagaaagttcgtttgcagagtgaacacagcaagactgtcttgacaaggggcaaactggagtctctttgcagggaacttcagcgtcacaataagacattaaaggaagaaaatatgcaccaagcttaagaagaagaagaaagtcgtaaagaagcagtggcacatttccaaattagtttaaatgaaattgagacacagctgcaacagcgtgacgtacataataccagacttcgccaggaaaacattgaactgggggagaaactgaagaagcttattgaacagtatgcactgagggaagagcatatcgacaaattgttcaaacataaggaacttcaacaacagctcttggatgccagacttcagcagacgacacagctcataaaggaagctgatgaaaaacatcagagagagagagagtttttattaagggaagcaacagaatcaagacacaaatatgaacaaatgaaacagcaagaagcacagctaaaacatcagctttctgtgtatatggataagtttgaagaattccagactaccatggcaaaaagcaatgaactttttacaaccttcaggcaggaaacggaaaagatgacaaagaaaattaaaaaactggaaaaagaaaccataatatggcgtaccaaatgggaaaataataataaaatacttctccaaatggctgaagagaaagctatttgtgataaagagtataatgcctttcaaataaaactagaaaggctagagaagctgtgtagagctcttcaaatggaaagaaatgagctcagtgaaaagatggaagtccttaaagatcaggtctctgtaaaagcagcacatgtggatccagcagtgcctgtgttacactcctgtgttgttgttggttcttgcaaaggaactgagaacttgctctga

SEQ ID NO: 34 - DNA, 2868 bp, synthetic construct
  source 1..2868: mol_type = other DNA
atgtcaaaaacaaataagtccaagtctggatctcgctcttctcgttcaagatctggatcaagatctcgttctcgttcattttcaaagtctcggtcccggagtcgatctgtgtctcgttcaaggaagcgcaggctgagttctaggtctcgttccagatcgtattctccagctcataacagagaaagaaatcacccaagagtatatcagaatcgtgatttccgaggtcacaacagaggctatagaaggccctattatttccgtgggcgcaacagaggcttttatccatggggccagtataaccgaggaggctatggaaactaccgctcaaattggcagaattaccggcaagcctacagtcctcgtcggggccgttctcgatcacggtccccaaagagaaggtccccttcaccaaggtccaggagccattctagaaactccgataagtcttcctctgacaggtcaaggcgctcctcatcctctcgttcttcctccaaccacagccgagttgaatcttctaagcgcaagtctacgaaggagaaaaagtcctcttccaaggatagtcggccttctcaggctgctggggataaccagggcgatgaggccaaggagcagacgttttccggaggcacctctcaagatacaaaagcatctgagagctcgaagccatggtcagatgccaccacctatggcgctggttctacatcaagggcctcggctgcttccgacatgagtccccgagagcgaagccctgctctcaaaagccctctccagtctgtggtggtgaggcggcggtcaccccgtcctagccctgtgccaaagcctagccctcccctctccaacacatcccagatgggctcaactctgtcaagtggtgctggatatcaggctgggacacaccaaggtcagttcgatcatggctctgggtccctgagtccatccaaaaagagccctgtgggtaagagtccaccggccactggctctacgtatggctcgtctcaaaaggaggagactgctgcttcaggaggagcagcttataccaagaggtatctagatgagcagaagacagagaatggaaaagataaggaacagaaacaaacaaatactgataaagagaaaatgaaagaaaaagggagcttctctgacacaggcttgggtgatgcgaaaatgaaatctgatccgtttgctcccaaaaccgatgctgagaagcctttccggggcagtcagtctcccaaaaggtataagctgagagatgactttgagaagaagatggctgacttccataaggaggagatggacgaccaagataaggacaaagctaaaggaaggaaggaatctgagtttgatgatgaacccaaatttatgtcaaaagtcatagcaggtgtaaacaaaaaccaggaggaggagaagtcgggcaaatgggagggcctggtatatgcacctccagggaaggaaaagcagaggaaaacagaggagctggaggaggagtctttctcagagagatctaaaaaggaggatcggggagggaccaagagaaccgagagtgggcatagaggatttgtgcctgagaagaattttcgagtgaccgcatacaaagcagtccaggagaaaagctcatcacctcccccaagaaagacttctgagagccgaggcaaaggagacttttccacagggaagtcttctttttccattactcgagaggcccaggtcaatgtccggatggactcttttgatgaggaccttgcacgacccagtggcttattggctcaggaacgcaaactctgtcgggatttagtccatagcaacaaaaaggaacaggaatttcgttccattttccagcatatacaatcagctcagtctcagcgtagcccctcagaattgtttgcccagcacatagtgactattgttcaccatgttaaagagcatcactttgggtcctcaggaatgacattgcatgaacgctttactaaatacctgaagagaggaactgagcaggaggcagctaaaaacaagaaaagcccagagatacacaggaggatagacatttcccccagtacattcagaaaacatggtttggctcatgacgagatgaaaagtcctcgagaacctggctacaaggctgagggaaaatacaaagatgatcccgttgatcttcgccttgatattgaacgtcgtaaaaaacataaagagagagatcttaaacgaggtaaatcaagagaatcagtggattcacgagattcaagccattcaagggaaagatcagctgagaaaacagagaaaactcataaaggatcaaagaagcagaagaagcaccgcagagcacgagaccggtccaggtcctcatcttcttcttcccagtcgtcccactcctacaaagctgaagagtacactgaagagacggaggagagagaggagagcaccacaggctttgacaaatcaagactggggaccaaagattttgtgggtccaagtgaaagaggaggaggcagagctcgagggacctttcaatttcgagccagaggcagaggctggggcagaggcaactactctggtaacaataacaacaacagcaacaacgattttcaaaagagaaaccgggaagaagagtgggacccggagtacacacccaaaagcaagaagtattacttgcatgatgaccgtgaaggcgaaggcagtgagaagtgggtgagccggggccggggccgaggagcctttccccggggtcggggccggttcatgttccggaaatccagcaccagccccaaatgggcccatgacaagttcagcggggaggaaggggagattgaagatgacgagagtgggacagagaaccgagaagagaaggacaatttgcagcctacaactgagtag

SEQ ID NO: 35 - DNA, 3069 bp, synthetic construct
  source 1..3069: mol_type = other DNA
atggcgattctcaaaaccatgcctctcccgaaaaaacaccagcccacgccccgcctaaaaaataaaaatttttatttattttacgacccgcctgaggggcgcagagaggaagggaaggctttccggcgagagcgcggtggggggcgcagccactgggcgggagcacaaagtgcgcgagcccgtggtagttccctcgcgactgctgcgtgcctgacgggcgttcctgagccctcacttcgttgtgtggcgggagcgcttgaccgctttcgttttggagcggtcgcttgtgtgtgcgtccgcccgagatcctctgcgcgggcggagccgggctggaacatggccgcctcgggcctgaatcatctgaaaaatgattacagaagaagatattgtcgaccttccagggcacctgacattaatgtggagcaaggcaagaatatactggaaatcttacaagactgttttgaagaaaaaagtcttgccaatgattttagcacagattctacaaaatcagtgccgtcttcaacacccaaaataaaagacacttgcattcagtcaccaagcaaagagcaccagaaatcccgtccaaagttgcttccagcttcttcaagaaagaaagaaggcttcattgtggaaccaaatgaagaggtcagcaaatcagttcaggcccctgaagttcatcagaaaactccggcaactgatgttggttctgaaaatacgactgacttgaaaaatgtgtcaagtagaaaacaaaatgaccatcacaatgaagttgatgaagaattttatatatctgttggttcgtcttctgttgttttggacgcaaaggcgtctttatcacaaaatgctattccatctattgcccaaaagaaagagacttacacttctgaaaactcactaaatgtgctgtcttcaagtacagagatttcttgtaaaaccaaaaaaaggttaaactttgaagatatttcaaagaaagtagaaatagaggataaagtattagaaggaccacaagggaagaaagcgtcaggaacacctcagaaaagaacccaagattcagaatatgaaattcaaccaaaagctaaaaagagtttttcgatattgtttttagaaactgtaaaaaggaaaactgaatccagtcctgtcattaggcatgtagcaactgatccacctcattcttctccaaatgacgtgaagttgttagaggatgaatttataatcgatgaatcagacataagttttggcaatcagtctttgattaagataccaagaaatgttaagcctccaaaacaacgcacaatatcccctgttgagagcactgtagtcctacaaggaaagaagtcaagagaaaaacatcacaatgtcacattgacaagtgataaaaattcacataaagctcacccagtagagaaacctcaaccctttgaaggaaaaaaacttggtaaatcttgtgcttcagcacctgaaatggagaataattgtaaatctacaaaagatgcattatattctgagaatgcagaaaagccatctgaaaataaagggactataaaacaaaataggagaagaaaagtcaaggccaaagtagttgaagaacatcttgatatggagcaacctaaagataaaaatataaatacgtcttttactgtccaaggaaaaaagaaaagtagaactcatgttcctattaaagaaaatcagaaaaaagttaaggaaaaattaaaaaacaagcatttttcaaatcagcccaagaaggagagccttgtacctgaggaagtgactttgactgtcacaaaaagtcgaagaatctccaagccaccttctaattggtgggaggtaaaatcagaccagagtcctgttggtagcaattcttctctaataaaaaatgaattatcattgcatcacaatagcagacaaaaacctgctggaaaaaaaaatcagtcatctaagaatattaggaaacaaactactccatttaaaaggcagaagacagctactcaaggcaactcaagagcacagacatttttaaatgctaaagattctggagatattatggaccatgatgaaatttccagttccaagaatgagccattggaaagtgatgaggcaagcctggctaagaagaaaaatcttgattgttctggaactacaggaggtttacaggatcaatgtagttcagatagtatttcaactcaacaaaatactgatcaaaagtctctgaccagtggatacgcgtgggagaagggaacagattctgaaaagctggggacttcaattttggaaggaagtggaccttctaatctccggaaatacgtgatgtctggaaagaataattctgatacaggtagaaaggaagctcagaaaagttcagatgacttaagagtgaaaagatctaaagtgatatcagagaacaaaatacatcacaaattagtattgccctccaatacaccaaacgttcgcaggaccaagagaacacgattgaaacctttggaatactggcgaggggagcgaatagattatcaagcaagtcagtcaggaggatttctgattggtggaatactatccccagacacagtgtcacctgaagggaagaaggcaaatagaaaaacgggaacagccaacaaaataactaataggaaaaggatctgtcttgataacaatgaaagaaagaaaaaattagtgacaaatctgaatatacctctaggagatccttttcagccaacaagggtaaaggacccagaaacaagagagagtattctcatggatcttgtaaggccacgagatacgtatcaattttttgttgagcatgaggagttgagagtatataaaacattggatacaccttttttttctactggaaaattgatattaggaccatgtcaagaaaagggaaagcagcatgttggcttagatacattggttttttatgttgactctggtgaccttttatgtaccttacatgaaacaccttatctaatgactgctggggattcattctatgttccttcaggtaattattacaacatcagaaatctccagaatgaggaaagtgttcttctttttactcagataaaaagatga

SEQ ID NO: 36 - DNA, 2493 bp, synthetic construct
  source 1..2493: mol_type = other DNA
atgaagataattatatatttttgcatttgggcagcagcatgggccgttccagttcctcaaaccaaacccttggagagacatgctgttgacaaatctttgaatttatatgtactagcaaaatccagtgtgacaatacaggatgagttaaatgccaatgacactgccaaagaaaatggtgtctccatgcatgaaagtgaaataggaaggcaacagtatacagaaaacagttgcaaaggagaagggaatggctctgagtgtgcagaattaggaggaaagaattcttacacacattccacgttagcagatgaagagaatattgagaatgggaatgggggcacaggaaacctagacacatatggttatgatgcgatacatggaaatgagaataacatcacaacaagtggcattaggggaaaagtaaacgtccttgacaatgttggagcagcaactgtgagcaatgttaatggaaacactgataagaatataatcaattgggatgtaggagatacaagtcatagtgagaatgtcactgttgtccctgaagatggaaatcaagtagctggaaacaataatagtacaggccatgtggatgaaataaatggaaattcctgtgggaatgagggtaacacaaatgaagtaacacctcagggagaaggtgggataaatgaaaacaaggaggctgtggcaactccagggagaagtggaactgacaatggacaaggtactactagcctgggtgattctgaggggggtcctagcgggagtggagcagaagaagatgaagacaaggagggctctggtgacgaagatgaagaaacaggggatggaaaagagggtgccgacaataacaatggccaggaagttcagggtaatggaaaagaagatggcaatgacaatagcacaggtcaaaattccatcagtattgaagatggtgaccctgaagatcaagaagctcctcataataaaaatgatggagacaacaccgccaagagtgaagaagattctgacggtattccagaaggcaatgatgataaaagcataaagaataccaaagaactcaatcacagagaaagcaaaaatgtgaacaagggagtcactgaagtagcagagcagagtgctgttggaaagagccaagataagggaatagaaattgaagttcccagcaatagcaacagaaataatattgccaaagaagctgggaaagtcaatgaagataaagagagtaaaagacaacatggaactatcatgggcaaaggaaatgtcaagacacaaggagaggctggtaacatacaaggaccaggccagaaatcagaacctggaaataaggctggacacagcaaaattggcggtgagagtaatagtgatggatatgacagttacgattttgatgatgagtccatgcaaggagatgaccccaacagtagcaatgagtccaatggcaatgatgatgccaattctgagagtgaaaatgacagcagtagccgaggagacgattcttatacctctgatgaatcaacagataatggcaatgacagtgattcaaaagaagaaggagatgatgctgagagtgatagcacaccagacactaatgatggtgacagtaatggaaatggtaacaatgggaatggaaacaatggtgaaccagagagtaaatcagatagcagtgacagcagtgacagcagtgatagcagtgacagcagtgacagcagtgatagcagtgacagcagtgatagcagtgacagcagtgatagcagcaacagcagtgatagcaaatcagacagcagtgacagtagtgatagcagtgacagcagtgacagtagtgatagcagtgacagcagtgatagcagtgacagtagtgacagcagtgatagcagtaagagcagtgacagtagtgacagcagtgacagcagtgatagcagtgacagcagtgacagcagtgatagcagtgacagcagtgacagcagtgacagcagtgatagcagtgacagcagtgatagcaaatcaggcagcagtgatagtagtgacagtagtgacagcagtgacagtagtgacagcagtgatagtagtgacagcagtgacagcagtgatagcagtgacagtagtgacagcagtgatagtgacagcagtgatagtaatgacggcagtgacagcagtgatagcagtgacagcagtgatagcagcaatattgatagcagtgatagtgatagtagtgacagcagtaagagcagtgacagcagtgatagtaatgacagcagtgacagcagtgatagcactgacagtagtgacagtagcaatagcagtgacagcagtgacagtagtgacagcaatgacagcagtgatagcagtgacaacagcggcagcaatgacagtgcatctgacagtagtgatgagagtgacagcaagagcaagtctgataatgggaacagcaatgcaagtgatagtgacagtgacagtgaaggcagtgacagtaatcactcaaccagtgatgattag

SEQ ID NO: 37 - DNA, 816 bp, synthetic construct
  source 1..816: mol_type = other DNA
atgagcttgtccttcctcctcctgctcttcctcagccacctgatcctcagcgcctgggctcacggagagaagcgcctcgcccccaaagggcaacctggacccgctgccactgataggagcccgggaggcgacagcaccagccagagctgcagcagcaccacgtcttcctcctctccctcctctacctcctctgccccggcggctaccctgggcaaccaaggaagcggctccgagcagagcagcttccagtggagcccctcggggcgccggaccggcagcctctactgcagagtgggcatcggtttccatctgtagatctacccggatggcaaagtcaatggatcccacgaagccagtatgttaagtattttggaaatatttgctgtgtctcaggggatcgtaggaatacgaggagttttcagcaacaaatttttagccatgtcaaaaaaaggaaaactccacgcaagtgccaaatttacagatgactgcaagttcagggagagatttcaagaaaacagctataatacctacgcctcagcaatacacagaactgaaaaaacgggacgtgagtggtatgtggctctgaataaaagagggaaagctaaacgaggctgcagcccacgggtcaaaccccagcacatctctacccattttttgccgagattcaagcagtcggagcagccagaactttctttcacggtcactgttcctgaaaagaaaaagccacctaaccctatcaagccaaaggttcccctttctgcacctaggaaaagccctaacacggtgaaatacagactcaagtttcgctttggataa

SEQ ID NO: 38 - DNA, 3510 bp, synthetic construct
  source 1..3510: mol_type = other DNA
atgtcccccagggtccctgcggggcggatacctccagtgttgcaggtgctgcaggcactcctgacgatgttattggcgccatggaggctgtgggcgttagatgacgagtgcacctggcagtttgtcttgaaccaattcgatagggtagggcagaacagtgcgagcgaccgcttctttcatcaagaacccgtggacacagtggagagcgtgttcagaacgctggtggacgagccaatcgacttggaggagaaatacctgggcttcccttatttcctgaagatcaactactcctgcgagggagcgccctctgaggccctgatccgtaagggccacctgacggggctaaagccggtggtgctggtcaccttccattctccagtcaacttccgccgatggaagatagagcagctacagatccagatggaagcagctcccttccgcagcaaagaagcctgcagtgcagaggagatgtgttccatgggctggtacacccccatgcccatcaagaacggcagcgtggtcatgcacgtggatatcagcagcaatggcttagggcccatcatccccaggaaaaggttctacttgaatatcaacggcttcctgaagatgcagcaagacaacacaatccggttcaccgtggggaatgagctcctcagcctgataccccggtactttgtgaatgccccttcacggcctctgtggtacactgtggaccaggcacctgtactcctcctgggtggcattcccaatgaaaagtctgtcctgctgacggacaccagcttcgaggacttctatattgtggagttgaacattgacagttgctgggtaggctccttctactgcccccagaccagctttacagccacgatccacgacgccattgccaccgagagcaccctcttcattcgacagaaccagctcgtctactattttacaggcacctattccatactccaggagaacaccagcagtggcagctgggttcgtgtcctggccaatgagtgcatcaagaagttgtgccccgtggagttacatagcaatggctctgagtatgtgatggccctcaccactggcaagaacgagggttatgtccactttgggaccattacagacggccgcgtgtcctttgagatgctgcccaggcagtggtccgtgtgcaaagggatacaagccaactgctccatcatctgggctgtattcagcggggccgacatcaacgatctgctgctgctggtggagagaagagaccctcctgccaggaagcgttccctagtggttggctacaacctggtcacagaagagctgtccatcctctatgagatcccagaattcatccctgacgcccgaggcctggaattcctgatgctccaaagagcagagccttacaccagcaccccactggtgcccaagggcatgttctacaacccatacaacaaactgctgttcatctggggcaacttcctcctgcagagctatgaccttgaaaattacatctacctggcggactttcccaaggagtcaaccatcaaatacctggtcaactcgttccgtggggacctggctattgtcacagagaccgaggagatttggtacctcctggagggcagctaccaggtgtacaagctgttcccgtccgccggctgggaggtgctcatcagcctgcaggcgatgcaccagtcatcactgtacacctccagtgagaccatggtcaccctcttctacgagcacagcaaactgtaccagctggtgtacctcatgaaaggcccggagagtcggctggtcaagaggcttgtgcccgtggagcagcttctggtctacctgaagctcaacaacagccatgtcttggagcgccaagggaactacctggcgcccaccttcaccagcttctgcccctttacggtgatgcgtctccaggacctgcccaacccgcagagatacacgcgccaggaacgctatcgggctttgccgccgcgcgtcttggagagctcgggcttccacagtgagaactcgctcgccatctaccagggcctcgtctactacctgctctggctgcactccaagtacgacaagccgtatgcggacccggtgcacgaccccacctggcgctggtggaagaacaagaaacaagaccagagttactacttctacctggcgagcaaccggcagagcacaggcggcgtgtacattgagatggacagctacgaaaagatctacaacctccagcccgaggcggagctgcccgagcgcatcttcctagacaagggcgccacctacagtttctcggtcttccttaccgcccgggggcaagccttcaggatcaagccggccttgggctcccccttctttctggagagccagttgggcctgggcgtggtgctggccgaccctaactgcctcgaggtgatggtgtcacagagcgtccttattaatcgcaactccttgttcttcgaggtcatgctcaaagataagagcgtctgctttgaccagggcatcagtgggcatcacctcaagaggacctcggtgctggtcaaggtggtgggctctgccgggcactgtttccagaacactcaccaggggcagcgcgtgcaaggcaacgtgatggtgccagtgcttatcggctgccccccgggcaagcgcctggccttcgacatcaccttcacactcaactacaaccgcgtggtgaataagcgctacttcgactgcgtgcaggtggacccggagatgccctgctttctcttccgtgacatcttgtaccccttcttcttgatccaagatttggtgacgggagactccggcagctttcagggcagatacgtgctgaaggtggtgggcggtgggcccaccctggacaccatcagagactacacagaggaggaaatctaccgctacaacaacccgcttgacaagacacacagcctcatctggaccgcgaagaacaggacaaccatggaagacttggccttcaacctcatgcccggccagcgattgggcattgagtggctgtgtctggagaactccccatgccatgacactgttcctcggagcatcttcgcccccgaattcttcttcaaggtgttggtgagcaatagaggtgtggacaagagcacatactgcgactaccagctcgtcttcctgctgcacatccacgggctcccgctcagtgccaggcagtcattcttcttcctcatggtgtcggccagcatcttcgtgggcctggtggccctctacctcatgatctgcttcctgtggcccttcgtggtgaaggcctgcaatgtcctccgctggaagataaacaacatcatggcccaagaatcctactgcagctacacctcgtcttcgagagtcttcagcgtgccatccaacatcccctccagggtcctctccaacgccccctccaaggccccctccaacatcccctccaaggccccctccaaggtcccctccgaggtcccctccaaggccggctgtaaggtggccgagaagggcaaggttgaacctgagcaaacctga

SEQ ID NO: 39 - DNA, 5826 bp, synthetic construct
  source 1..5826: mol_type = other DNA
atgagtgccgactcggaaatggctgtttttggggaggccgctccttacctccgaaagtctgaaaaggagcgcattgaggctcagaacaagccttttgatgccaagacatctgtctttgtggccgagcccaaggaatcctttgtaaaagggactatccagagcagggaaggcgggaaggtgacagtgaagactgaaggtggtgcgactctgacggtgaaggaagatgatgttttccccatgaaccctcccaaattcgacaagatcgaggacatggccatgatgactcacctgcatgaacccgctgtgctgtacaacctcaaagagcgctacgcagcctggatgatctacacttactccggtttgttctgtgtcactgtcaacccctacaagtggctgccagtgtacaacgcagaggtggtgacggcctaccgaggcaaaaagcgccaggaggccccaccccacatcttctccatctccgacaacgcctatcagttcatgctgactgatcgggagaatcagtctatcttgatcactggagaatccggggcagggaagactgtgaacaccaagcgtgtcatccagtactttgcaacaattgcagttactggggacaagaagaaggaggaagttacttctggcaaaataaaggggactctggaagatcaaattatcagcgccaaccctctactggaggcctttggcaacgccaagactgtgaggaatgacaactcttctcgctttggtaaattcatcaggatccactttggtaccacagggaagctggcttctgctgatattgaaacataccttctggagaagtctagagttactttccagctaaaggcagaaagaagctaccacattttttatcagatcatgtctaacaagaagccggatctaatcgaaatgctcctgatcaccaccaacccatatgactatgccttcgtcagtcagggagagatcacagtccccagcattgatgatcaagaggagttgatagccactgatagtgccatcgaaatcctgggcttcacttctgatgaaagagtgtccatctataagctcacaggggctgtgatgcactatgggaacatgaaattcaaacaaaagcagcgtgaggagcaagctgagccagatggcactgaagttgctgacaaggcggcctatctccagaatctgaactctgctgacctgctgaaagccatctgcttccccagggtgaaggtcggcaatgagtacgtcaccaaaggccagactgtggagcaggtgtacaacgccgtgggtgccctggccaaagccgtctacgagaagatgtttctgtggatggtgacccgcatcaaccagcagctggacaccaagcagccccggcagtacttcatcggcgtcttggacattgctggcttcgagatctttgatttcaacagcctggagcagctgtgcatcaacttcaccaacgagaaactgcaacagtttttcaaccaccacatgttcgtgttggagcaggaggagtacaagaaggaaggcatcgagtggaccttcattgacttcgggatggacctggccgcctgcattgagctcatcgagaagcccatgggcatcttctccatcctggaagaggagtgcatgttccccaaggccacagacatgtctttcaagaacaagctatatgaccagcacctgggcaagtcggccaacttccagaagcccaagcctactaaaggcaagcctgaggcccacttctccctgattcactacgctggcaccgtggactacaacattaatggctggcttgacaagaacaaggaccccctgaacgataccgtggtcgccctgtaccagaagtcttccatgaaaactctggcttacctcttctctggggcagcagcagctgctgaagcagaggctggtggtggtggaaagaaaggtggtaagaagaagggttcttctttccagactgtgtctgctctcttcagggagaatttgaacaagctgatgaccaatctgaggagcactcacccccactttgtacggtgcatcatccccaacgagaccaaaactcctggggccatggaacacgaacttgtcctgcaccagctgaggtgtaatggtgtgcttgaaggcattaggatctgcaggaagggattcccaagcagaatcctttatgcagacttcaaacagagatacaaggttttaaatgcaagcgctatccctgaaggacaattcatcgatagcaaaaaagcttctgagaagctccttgggtccattgacattgaccacacccagtataaatttggtcacaccaaggtctttttcaaagctggtcttctggggctcctagaggagatgagagatgaaaggctggcccagctgatgacccgaacccaggccaggtgcagagggttcttggcaagactggagtaccagaggatgctggagagaagagagtccgtcttctgcatccagtacaacatccgtgccttcatgaacgtcaagcactggccctggatgaagctgtacttcaagatcaagcccctcctcaagagtgcggagaccgagaaggagatggccaccatgaaggaagagtttgagaaaatcaaagaagaactggctaagtcagaggcaagaaggaaagagctggaagaaaaaatggtagctctgatgcaagagaaaaacgacttgcaactccaagttcaatctgaagcagacagcttggctgatgcagaggaaagatgtgaccagcttatcaaaaccaaaatccacctcgaggccaaaatcaaagaggtaacggagagagccgaggatgaggaagagatcaatgctgagctgacggccaagaagaggaaactggaggatgaatgttcagaactgaagaaagacatagacgaccttgagctgacactggccaaggttgaaaaggagaaacatgccacagagaacaaggtgaaaaacctcacagaggagatggcaggcctggatgaaaccatcgcaaagctgaccaaggagaagaaggccctccaagaggcccaccagcagaccctggatgacctgcaggcagaggaggacaaagtgaacaccctgaccaaggcgaaaaccaagctggaacagcaagtggatgatcttgaagggtctttggaacaagaaaagaaaatccgaatggatctagaaagagtaaagaggaaactggagggagacctaaaattagcccaagaatctacaatggatatagaaaatgacaaacagcaacttgatgaaaagctgaaaaagaaagagtttgaaatgaacaatctgcaaagcaagattgaagatgaacaggccctcggtatgcagctgcagaagaagatcaaggagttgcaagcccgcattgaggagctggaggaggaaatcgaggcagaacgggcctcccgggccaaagccgagaagcagcgctctgacctctcccgggaactggaggagatcagcgagcggctggaagaagctggaggggcgacttccgcccagattgagctgaacaagaagcgggaggctgagttccagaaaatgcgcagggacctggaggaggccaccctgcagcatgaggccacggcggccaccctgaggaagaagcacgcggacagcgtggccgagctcggggagcagatagacaacctgcagcgggtcaaacagaagctggagaaggagaagagtgagctgaagatggagattgatgaccttgctagtaacgtagagactgtctccaaagccaagggaaaccttgaaaagctgtgccgcagcctagaagatcaaatgagtgaacttaagacaaaggaggaagagcagcagcggctgatcaatgacctgtccgcacagaaagcacgcttacagactgagtcaggtgaattttcacgccagctagatgaaaaagattcattagtttctcagctcacaaggggaaaactggcattcacacaacagattgaggaattaaaacggcagcttgaagaggagataaaggctaagagcgctctggcccacggtctacagtcggctcgccatgactgtgacctgctgcgggaacagtacgaggaggagcaggaagccaaggctgagctgcagagggcaatgtccaaggccaacagtgaggttgcccagtggaggaccaaatatgagacagatgccatccagcgcacagaggagctagaggaagccaagaagaagctggcccagcgtctgcaggatgctgaggagcacgtggaagccatgaacgccaaatgcgcttcccttgaaaagacgaagcagcggctccagaatgaagtggaggacctcatgctcgatgtggaaagatcgaatgctgcctgtgcggccctggacaaaaagcagagaaacttcgacaaggtcctgtcagaatggaaacagaagtatgaagaaactcatgctgaacttgaagcatcccaaaaggagtcccgctcactcagcacagagctgttcaaaattaagaatgcttatgaggaatctttagaccaacttgaaaccttgaagcgggaaaataagaatttgcaacaggagatttccgatctcactgaacagattgcagaaggagggaaacgtatccatgaattggaaaaagtaaagaagcaaattgagcaagaaaagtctgagattcaggctgctttagaggaggcagaggcttcccttgaacacgaagagggaaagatcctgcgcatccagcttgagttgaaccaagtcaagtctgaaatcgataggaaaattgcagaaaaagacgaggaaattgaccagctgaagagaaaccacattcgagtggtggagacaatgcagagcgcactggatgccgagatcaggagcaggaatgatgccatcaggctcaagaagaagatggagggagacctcaatgagatggaaatccagctgaaccacgctaaccgcatggctgctgaggccctaaagaactacaggaacacccaaagcatcctcaaggacacccagctccacctggatgatgctctccggagccaggaggacctgaaggagcagctggccatggttgagcgcagagccaacctgcttcaggccgagatcgaggagctgcgggccactctggaacagacagagaggagcaggagaattgcagaacaggagctccttgatgctagtgagcgcgtgcagctcctgcacactcagaacaccagcctgatcaacaccaagaagaagctagagacagacatttcccaaatccagggagagatggatgacattgtccaggaagctcgcaatgcagaagagaaggccaagaaggccatcactgatgccgccatgatggctgaggagctgaagaaggagcaggacaccagcgcccacctggagcggatgaagaagaacctggagcagacggtgaaggacctgcagcaccgtctggatgaggctgagcagctggccctgaagggaggcaagaagcagatccagaagctggaggccagggtacgtgaacttgaaggagaagttgaaagtgaacagaagcgcaacgttgaggctatcaagggtcttcgcaaacatgagagaagagtgaaggagctcacctaccagactgaggaagaccgcaagaacgttctcaggctccaggacctggtggacaaactgcaagcgaaggtgaaatcttacaagagacaagctgaggaagcggaggaacaatccaacatcaacctctccaagttccgcaagctccagcacgagctggaggaggccgaggagcgcgctgacatcgccgagtcccaggtcaacaagctgcgggtgaagagccgggaggttcacacaaaaatcataagtgaggagtga

SEQ ID NO: 40 - DNA, 5955 bp, synthetic construct
  source 1..5955: mol_type = other DNA
atgagctctgactcagagatggctgtttttggagaagcagctccctacctccggaaaccagagaaggagcgaactgaggctcagaaccgcccgtttgattctaagaaggcctgcttcgcagtggatgataaggaagtgtacgtgaaaggtatgatccagaacagggagaatgacaaagtcacagtcaagaccctcgatgaccggacaatcactctgaacactgcccaggtgttccccatgaaccctcccaaatttgataagatcgaggacatggccatgatgactcacctgcatgagcccgctgtgctgtacaacctcaaagagcgctacgcagcctggatgatctacacctactcaggcctcttctgtgtcaccgttaacccctacaagtggctgccggtgtacaaccccgaggtggtgatggcctatcgaggcaagaagcgccaggaggcccctccccacatcttctccatctccgacaacgcctatcagtttatgctgactgatcgggacaaccagtccatccttatcaccggagagtccggggctgggaagacggtgaacaccaagcgtgtcatccagtactttgccacaattgcagttcctggagacaagaagaaggagccacagatgggcaaaatgcagggaaccttggaggatcagatcatccaggccaacccccttctggaggcctttggaaatgccaagaccgtgaggaatgacaactcttccagatttgggaagttcattcggattcatttcggagccacgggaaagctggcatccgcagacattgagacctatctcttagaaaaatccagagtgacatttcagttatccagcgagagaagctatcatattttttaccagatcatgtcaaacaagaagccagaactaattgacctactgctgatttccaccaacccctttgactttcccttcataagtcaaggagaggtcactgtagccagcattgatgacagtgaggaactgttggccactgataatgccattgacatcttgggcttcagttcagaggagaaagtggggatctacaagctgactggagccgtgatgcactatgggaacatgaagttcaagcagaagcagcgagaggagcaggcagagccagatggcacggaagtggctgacaaagctggatacctgatgggtctgaattctgcagaaatgctgaaaggcctgtgctgtccaagggtgaaggttggcaacgaatatgtcactaaagggcaaaatgtccagcaggtaaccaactcagtgggcgctctggccaaagctgtctatgaaaagatgtttctgtggatggtggcccgcatcaaccagcagctggacaccaagcaggccaggcagtacttcatcggagtcttggacattgctggcttcgagatctttgatttcaacagcctggagcagctgtgcatcaacttcaccaatgagaaactgcaacagtttttcaaccaccacatgttcatgttggagcaggaggagtacaagaaggaaggcatcgagtgggagttcattgacttcgggatggacctggctgcctgcattgagctcattgagaagcccatgggcatcttctccatcctggaagaggagtgcatgttccccaaggccacagacacttcctttaagaacaagctgtatgaccagcatttgggcaagtcggccaacttccagaagcccaagcccaccaaaggcaaggctgaggcccacttctcgctggtgcactatgctggcaccgtggactacaacattgtcggctggcttgacaagaacaaggaccccctgaacgagactgtggttgggctctaccagaagtctgcactgaagctgctggcctttcttttttccaactacgctggtgcagaagcaggtgactgcgggggaagcaagaagggcgggaagaagaagggctcctctttccagaccgtgtccgcggtgttcagggaaaatttaaacaagctgatgaccaacctgaggagcacacacccacacttcgtacggtgtctgattcccaatgagaccaagactcccggggtgatggaccactacctggtgatacaccagctgcgctgtaatggggtcctcgagggcatccggatctgcaggaaaggattcccgagccgaatcctctacggtgacttccgacaacggtaccggatcctcaatgccagtgccatcccagaagggcagtttattgacagcaagaatgcttctgaaaagcttctgaactccatcaatgtggaccgggagcagtacaggtttggccataccaaggtgtttttcaaagctggactcctgggccttttggaggagatgagggacgagaagctggcgaccctgatgacacgcacccaggccgtgtgcagggggtacctgatgcgagtggagttcaagaagatgatggagaggagggactccatcctctgcatccaggacaacgtccgctccttcatgaacgtcaagcactggccctggatgaatctcttcttcaagatccagcccctgctcaagagtgcggaggcagagaaggagatggccaccatgaaggagaacttcaagagggcccaggaagaactggccagatccgaggctcgccggaaggagctggaggagaaaatggtctccctgctgcaggaaaagaatgacctccagttacaggtgcagtctgaaactgaaaatctaatggacgctgaggaacggtgtgaggggctcatcaaaagcaagatccaactggaagcaaaagtcaaggagttgaacgagaagctggaagaagaagaagaaataaactctgagctagttgcaaagaagaggaacctagaagataaatgcttctctctcaagaaagacatcgacgacctggagctgaccctgacaaaagtggaaaaagagaagcatgccacggagaacaaggtgaagaatctctctgaagaaatgacagctcttgaagaaaacatttccaaactgaccaaagagaagaaatcactacaggaagcccaccagcaaaccttggatggtctccaggttgaggaagataaagtcaacggcctcatgaaaatcaatgccaagctcgaacagcaaacggatgacctcgagggctgcttagagcaggagaagaaactgcgggcggacctggggagagtgaagaggaagctggaaggagacctgaagatgtcccaggaatccattacagatctagaaaacgcccagcagcaaatggaggagaaactgaagaagaaagagtttgaaatcagtcagttacaaaccaaaattgatggtgaacaagtccacagtttgcagttacaaaagaagattaaagaattgcaggcccgcacagaagagctagaggaagatattgaagctgaacacacactcagagccaagcttgagaggcagcgctctgacctggccagggagctggaggagatcagcgagcggctggaagaagccagcggggcgacttccgcccaggttgagctgaacaagaagcgggaggctgagttccagaaaatgcgcagggacctggaggaggccaccctgcagcatgaggccacggcggccaccctgaggaataagcacgcggacagcgtggccgagctcggggagcagatagacaacctgcagcgggtcaaacagaagctggagaaggagaagagcgagctgaagatggagatggacgacatggccagcaacattgagaccatcaccaagtctaagagtaacatggaaagaatgtgccggaccatggaagaccaattcaatgaactcaaagccaaggatgaccaacagacacagttgatccatgatctgaacatgcagaaggcacgactgcagacccaaaatggagagctgagccaccaagtggaagagaaggagtctctgatttcacagctaaccaaaggcaagcaggcccttacccagcagctggaggagcttaaaaggcaactggaagaagaaaccaaggccaagaacgccctggcccacgccctgcagtcctcccgccgtgactgtgacctgctgcgggaacagtacgaggaggagcaggaaggcaaagccgagctgcagagggcgctgtccaaggccaacagtgaggttgcccagtggaggaccaaatatgagaccgacgccatccagcacacggaggagctagaggaggccaagaaaaaactggcccagaggctgcaggaagctgaggagaacacagaggcagtgaactccaagtgtgcctccttggagaaaaccaagcagaggctccagggagaagtggatgacctgatgcttgacttggagcgggccaacaccacctgtgccaccctgggcaagaagcagaggaacttcgataagatccttgcagactggaagcaaaagctagacgaaagtcacactgagttggaagctgctcagaaagagtccaggtccctcagtactgaaatcttcaagatgaagaatgcctacgaggaggtggtagatcagttagagaccctgaggcgggagaacaaaaatctgcaagaagagattcatgatgtaactgagcagattgcagaaactggcaagaatcttcaggaaatggaaaagaccaagaagcaagtggagcaagaaaagtcagatctccaggttgccttggaggaggtggagggttccctggaacacgaagaaagcaagatcttgcgtgtccagctagagctgagtcagctaaagtcggagcttgaccggaaggtcgctgagaaggacgaagaaacggagcagctgaaaagaaactgccagcgggcagctgaggccacgcagagcctgctggaggcggaaagccggagccggaacgacgccctgaggctgaagaagaagatggagggagacctcaacgaaatggaggttcacctgggccatgccaaccgccaggtggcggagacccagaaacacctgcgcacagtccagggtcagctcaagggttcccagctgcacctggatgacgccctgaggagcgacgaggccctcaaggagcggctggccattgtggagcgccggaacgggctcctggtggaggagctggaggagaccaaggtggccctggagcaggcggagcggagccgccggctgtcggagcaggagctgcaggacgccagcgaccgggtgcagctcctgctctcccagaatacaagtctgataaatatcaagaaaaaactggagaccgacatagctcaatgccaggcggaagtggaaaactctgtccaggagtccagaaatgcagaggagaaggccaagaaggccatcacggatgcagccatgatggctgaggagctgaagaaggagcaggacaccagcgcccacctggagcggatgaagaagaacctggagcagacagtgaaggacatgcagcaccgtctagatgaggctgagcagctggccctgaagggagacaagaagcagatccagaagctagagaaccgggtacgggagctggaaagtgagctagatactgagcagaagaggggggctgaagctctcaagggggcccacaaatacgaaaggaaggtcaaggaaatggcttaccaggccgaggaagaccacaagaatagcctcaggctccaggacctggtagacaagctgcaggccaaagtgaacgcttacaagaggcaggctgaggaggccgaggagcaggccaacacgcagctctccaggtgccgcagagtccagcacgagctggaggaggcggaggagagggtggacattgccgagtcccaggtcaacaagctgagggccaagagccgggatgtgggaagccaggtaagagcagacacctgggcatggcttcttctcaaggagtcccgagacccaggggcccagagttcacacagggaaagtttggaggctgcccattggtccctgctgctggtcatgccctcacagatgccaccaacgcagcaaaggctcctgtga

SEQ ID NO: 41 - DNA, 2373 bp, synthetic construct
  source 1..2373: mol_type = other DNA
atggctgggatctctgcgccgggcagcagaaggaggagcgggcccccggcgcttcgccctggcccgccgcctggcgccgggcatcccccgagcaagcgggcccggggctaccccatcgccgctccggaccccgaagacccattcggcgcgcatggggacttcaccgccgacgacctggaggagctcgacatcctcgcgtcacaggccctgagccaatacccggccacgaatcgggacgcgtccagtgttcataaggtccccagaatagatgggatggcaaaaaataaaaatcctacaggaaaaagcagagaaagtatgccagttaaagataattttgaattagaggtacttcaggcacaatacagagaacttaaagaaaagctgaaggcaatggaagaagacgtcctcattaaaaatggagaaattaaaattttgcgggactcattacatcaaacagagtccattctggaggaacagagaagatcacatttccttcttgagcaagagagagcgcaagcactgagtgacaaagaaaaggaattctccaaaaagctccaatcattgcagtctgaactccagtttaaagatgcagagatgaatgaattaaggacaaagcttcaaagcagtgaacgagcaaataaactggctgcacccagcatttcccacctcagtcctaggaaaagtccttccatggttataaagccagaagcatgttcaccacattttggaaaaacatctttccctacaaaggagtcttttagcgctaacatgtcccttccccatccctgccagacagagcaaggatacaagtctctggtgggcagagaggaaaataaggcccataatctgggaggtgaatccataaaacaagaagaagcccccaaaattcttgttgacagttggatgcagagatcagacactcaaggttccattttgataaacctgcttctgaagcagcctttgatcccagggacatccctaggtctgtgccacctcctgagcagttgttccgaggctcctactggcacccttttacagccgccaggatttggcagtgccttgtctgggatttcaggcctcaggaccacaggttttcgtgaagggtcattttccttgtcagccctgagagaagcacagagcctggcatccactggactgaatctggttgccaggagtgaaggttcatgtgaccaagacccagcagaggggggcagaaggaccttcccactctgccagcttcctggagctgtgcatctcctccctcttgtacagttcttcattggcttacatggccaggctctgcaggatttggcagcagccaagagaagtggagcacctggggactcaccaacacattcctcctgcgtgagctcaggggtagaggccagccccgaggactcactttgcaacctagaaggtttctctgtggcttcacttagcattcttcagcacctggtatgccacagtggagcagtcgtctgcctgttactgtcaggagtaggggcagatactgcttctggggaaggaaacaagagccagcttcacagacatggtcatggagatgtgacctcagcccctaaggggattgccgatgaccaggcccaacatcctctactgaatatgcttcttcacctgttggctttttcttctgcagcaacaggtcaccttcgagccagcatcctgagccagagccttaaggttttggtgaagttagcagaaaatgcttcctttgatttgttgcccagattccagtgtgtgttccgggtgctgccacagtgcctcagcccagaaacgcccatccccagcgtgctgttgactgtagagctcctctccctgctggtggaccacgagaagcttgcccctcagctctgtgcccattcggagggctgcctcctcctgctgctgtacatgtacatcacgtcaaggcctgacaaagtggcctcggagagacagtggctccagctggaacaagaggtggtgtggctcctggcaaagcttggtgtgcagagcccctccccagtcactggctccaactgccagtgcaacatggaggtggtgagagcgctcacggtgatgctgcacagacagtggctgacagtacggagggcagaggggcccccaaggactgaccagcagaagcggacagtgcggtgtctgcgggacacagtgctgttgctgcacagcctgtcccagaaggacaaactcttcactgtgcactgcgtggaagtcctgcatcagtatgaccaggtgatgccaggggtcagcacactgatccgagggctccctgatgtgacagactgtgaagaggcagccctggatgacctctgtgctgccgagaccgatgtggatgaccccgagatggactgtgcctga

SEQ ID NO: 42 - DNA, 2064 bp, synthetic construct
  source 1..2064: mol_type = other DNA
atggctgaactgacttctatgaactggaacgtgtcctccaaccggcaagcgcatcacacagacaagttctacagcccggaactgatcttgcggagaggccaactcttcacagtctcattgggcttccgggaaaatgtgggctctggacaaaatctgacgttcacagtctccacagggcctaacccctcagagtctgccaagacgaaggctgtgtttcaactctccaatggaaaaagtggtggctggagtgcggagctccaggccaaccggggcaacactctgaccatcagcatctccagtcctgccaacgcacccataggacggtacacgctgagccttcagagctccttcttctctgggcaacttggaacgttcatactcctctttaatccctggcttcaagcggatgatgtctttatgagtaatgctgctgagagagaggagtacgttcaacaagatgccggcatcatctatgtgggaagcacaaatcgcattagcatggttggctggaactttggacagtttgagcaggatattctgagcatttgcctctcgatcctcgataaaagtctgaatttccgccgtgaccccgctaatgacgtggcccagagaaatgaccccaaatatgttggccgggtgctcagtgcaatgatcaacagcaatgatgacaacggtgtgcttgctgggaattggagtggcagctacccgggtggccgggacccaaggaactggaacggcagcgtggagatcctcaaggagtggaaaagatccagcttcaagcctgtgcgctatgggcagtgctgggtctttgctggaaccctcaatacagcattgcggtctcttgggattccctcccgagtgatcaccaacttcaactcggctcatgacacagaccaaaacctcagtgtggatgtgtactatgaccccaggggaaaccctctggacagaggcagtgacagcatatggaatttccatgtctggaatgaagcctggtttacccggacggacgtgggtccctcatacagtggatggcaggtgttggacgcaactccccaggaaaggagccaaggggtgttccagtgtggccctgcctcagttatcggtatccgagagggtgaagtggaccaggactttgacatgcccttcgtcttcgcggaggtgaacgccgaccgcaacacctggatctatgacagtaccaccaacactcagatgaagagttcctctgagtcgagctccgtgggcaagtacatcagcaccaaggctgtgggcaccaactcccgcatggacgtcacggagaagtacaagtaccccgacggttccgctcaggaaagacaagtgttccaaaaggctctggggaaacttagacccaaccgattgttcagggcaacatctgcagagagctcggaaagagacgttcagaagcccagtatctctgggaagttcaaggtcactggtcttctggtagtgggccaggaagtcaacctggccctgaatttgaaaaacctggcaagtggtaggaagacgatgacggtgaacatgacagcctggaccattgtctacaatggcacgctagtacatgaggtgtggaaggactccttcaccatttctctggaccccggagaagaaacgcagcaccccgtaaagatctcatacgctcagtacgagaagtacctgaaagctgacaacatgatccgcatcacagccgtgtgccaggtccccagcgagggcgatgtggtggtagcacgggatatcatcctggacaacccttccctgactcttgaggcgctgggtgaggcacgggtgcagaagcctgtgaacgtgcggatgctgttctccaaccccctggacgaacccgtgaagaactgtgtgctgatggtggaggggagcggcctgctgcggggcaacctcaaaatcgacgtgccaaacctgcgccccaaggagcagtcccatgtccgttttgagatcctgcccacccggagtggcaccaagcagctgctcgctgacttctcctgcaacaggttccctgcaatcaagtccatattgcccatcgacgtggctgagtga

SEQ ID NO: 43 - DNA, 1070 bp, synthetic construct
  source 1..1070: mol_type = other DNA
agctgaggtaagggaggagggatgggatggcagagatccagagagggacagagacagagagagaggagagacatggtggagaggcagggatgggagagacagggagagacggggagagaggagtgacatgggggagagacagggatgggagagacagggagagaggggagacatgggggagaggcagggatgggagagacagggagagaggagagacatgggggagaggcagggatgggagaggcagggatgagagagacggggagagagacagagaaaggaaataataacagcagtagcagtaatagtagcgacgttagcacagttttaacacatacgcgccctccctgtgcaccaggctttctcctgggctccctctctacctccctccaccctgggctgcccccccccattccactcgcctcggccaccttgaggagctggaggtcatgggtgtcaagctggggattgtagagtgggtagggcacggccctttcaatggtgaacacctgccaggtaggctctgcctgtctgcaggctgtggggccccaggaccacccagaaggcactgaggttcccactgcaggaggcacaagagagagtgctgtggctggagtacccccaacctgcagcccgccctcgggtggccccagccactcacctgggcacctcacagtgtgcggctgtcagcacccagcatggctgcaccagcaccgccctgtggatgtgctttttgtcccgctgcagggatgccatgaagggctgggagtggggcactacttcatgaccccccacgatcctgctgctgttgtgcagggagcctgtgggagctgagcggagtaaggccgcgaggggcctgtgaccgcctttgccacatgccggccatgttctaagtgactgtatctcctgtgctgctggaaaagatgaccacaaacttggtgccttaaaatgacacaaatttatcatttcacagttctggggcagaagtcctaaggggtctcatggggctgaagtcgaggtgtcagctggttccttccggaggccctaggggagaatcatctcccgccttt

SEQ ID NO: 44 - DNA, 1240 bp, synthetic construct
  source 1..1240: mol_type = other DNA
tttcagaaatctgcacaaaagataacgacattaaagatgcgctgtaagctgatgtaactactaaatatcagaaactctccaaactttaatgtattgagaaacatttggaaattgctttgtctttgaccctgtgagggaatatatagctcatagtggttcgaagcacagattctggatccagactgatcacaatcctgatttgctgtttctaagtaggttacttgacttttgtgcttcatttcctcaggtataaaatggggataatacaatatgtagctcatagatttgaggattgagttacattgtgtcaagcacttttagaaaacagtaactgctgtgttagctattatgattactctcataggtagaaaggcacttggcatgtaagttagctgttttattactctcttagatgggaaagtttgaaaagaaacagtatctgtttgagtgggtctcgtaagaacgattcctttttaaatggcttacctcagtgtggacaacgtaaggaaggccctgctcttctgtaaagaaggtaatctgacagggatatgaaataaacaactaaggatgacactggcaaataaaaattagtgaggataggtggcttcttaaaaggtcccattttcatcccttcccacttttcatttacatggcaccaggtaatttttagagtgctttaatatgcatcagaacacacttaagttgagagaaagggcaagtcaccaagtgtttcttgattttaaaattatttaaaaattaaatatatgcacaagagtaatatgtatatactgtttaaagagtaaaaatagaagcataccacataggttgagaggagcctatcaccaccaccttggacgctcccactgtcccccctcccatatctcagctccctctccacctgaagaaaccagagacagaaaagcgattctcttgcttttctctagttttccaacctatctgtattttcctaaataatatggtggtggtttgcatcttttgtttttttttttttaacttaatagagatggaaccttactgtgtttaatgccttttttcattccatattattttaaaaattcatccctgttgatgcatatagctgtagttcatgtatttatacttctctagtattcctttatatgaacacacagcagttttatctgttttactgttgatgccatgtaggttatttataaatttgggatactgtgagcagtgctaataaggaacctgtacatag

SEQ ID NO: 45 - DNA, 2682 bp, synthetic construct
  source 1..2682: mol_type = other DNA
tgtatatatgtggcaaaaaaggttttttctatgctttacaaagcaatattgatgatagtatacatacatattattattatcttagaatatataaaagcatgtatgttctcagtttacaatgtagtaacattatttaattttaatttgattaagtaaatgttaagtaaatagtttgattaagctgttgttatgtaatgataaaataatattatatatgtattttttttatgggttattcttttacttttttaatttctgcagagcaagtaagctgatatttgtttagagaagataaaatccccattatgtaggtggcaaaattgaatggtcactcagaatttttttttttttgattaaaaaagaaaggggaaaaaaaaaaaacccaaaccaaatcccttgctgtcgagtccattctaactcatagtgaccctataggacaaagtagaactgccccctagggtttccaaggagcgtctggtgaattcaaactccaaccttttggttagcagccaagctctttgacctctttgccaccaaagccgtctccttttccaaagatccaggtttatattctggttaaaatcagattctgactctactcctataaaaaggagacctgaaatatattattctagaagcaattctcttatggaaaacatgtggcaataacattctactagtttttatctactcattctcttctcaatataaaatataagaataataataaaagctgatgtgcaaagagcatgtactatatgtcatacattgtttttgtcaccatttttcaattgagaaaatcgatgcccaggagacaccaataacttgatggagtcgactcaaaaccagtcttgctccagaatttttattatccaaatgtatactcaggacacggcatgttgagtgctgtaaaaatgtaatctcacaacccagaatcaaccagtataagcatttttctctgctttcttaaatatctattcattaaatctaaatgaattaaatcattaaattaaacctaatatatatatatacatttcaaaattgggatcacactttagcaattgtttttctactcttttcacttaactggttttatatagagaaaaacattttccaaagtcagtgactattccataaatgtataaattgcaatggttttataatatttacagaatatcagcacacctttatttgtggaaacagcacttctcactacacctttccctgcactgcaagtgggagctgaatatattcagtgaacagtatagtgcacgagggtgcaggtgggggaagggaaaagtggtgagaataaattgggagggcattagcagttccatttcaatataaatgatcagctggcttatggacatttgactcctctcagcttgatttgaaactgtctaatctcacttttttttgtttctcctaataaatgaaaagctaaatctattttttatctcactttattgttccattatttaataggttatcaattcttgaatggaggtggagatattggggcagccttgacaaaattgatgcttttccttgtcattatttgtgcaaatattatgttctgtttctattgtctttaaaaatttaaattaatttttggtatggagcagtgtgacgtttgcaggtaattttatttatttgtcttttctctttggatttataacaaatacttacgcattcaaaatcaggtaaatatgtttttacaaatgtcaatgtttttctatttaaattgtaattcgtatgtaatgtgatttttatgtatggtgtagactaatggactaactcaagttctttctcaacaaaaacaattagccatattttctaacatcaattcaaaaataatatagatagtaaatgaaaacttttgtcccactttttctgtttttcttttgcttcttttaaagacatttgaaaactaaataagaatccaggaacctaattgtgccaaatacatagtgggaatgaatcacttgttttcaaaatgtatacgtgtggcttgtcactcttctgacacctacccacatcaggcctggccagaactccattgtggcaggctttttcttaactggtattaaaaattaaatttaggtgcggggggggggggtgggaatattagactcccaagaccttgtgccttccttaaatgctccagttctatctgacacccaatttcagataattaaaataaagtgatacctttttccaatttgctgttgttacttcaggcaaatagctcctactgataattcattagaagagggatagccaggctaaaggaggatcaagaaattgtcttccagtcaaatgtgaatcagtagtctcaaattacatcgtaattcctaataaataataattattttttatttatgaagtttcttgttgcaatcatgtagtacatttttatacatacaagaatgtatttcagattattgttttttttctttcagtttgcttgcctatttttgtcttagtatcacaggcttgttacacaataagacaatctctggcagagctatactttttcaaatcattttaaaggtagtattacttataatttcagtgatttcagaattattttgcatttaaaataattcctactgtatttcatcagaattgcatttagtatgtgtcatgagttgaaatgtgttccctcaaaatatctgtcaa

SEQ ID NO: 46 - DNA, 3332 bp, synthetic construct
  source 1..3332: mol_type = other DNA
gtatttgttacaattaataaacaagtattgatatgtaattattaacaaatgtccatatttattgaaatttctttagttttttccctcatattctttttctgttttaggatccaaccaagggagtacattagatttagtcagcatgtttccatgatgattcctctggcagtgacagttctcagaacttagaagtttttaggagtactggttaggtattttatagactatccctcttttggaatttgtctgatatttttctcatgcttagactggggttattggtttgggggaggaagataattgagtttgtaaagtgtcattttcatcacatcatatcaagagtacatgctatcgccatgacttatcactgttgatcaacaggctgagatactgctcgccagatttctccacagtaaagttactcttttcctctcctttccatgatatgctgtttggatggaaatctctatgcatagcccacacttataatggggagttatggttaacctccttgagggcagagaatttacataaattatttggaattcttctgaaggggaggtagatcttgtctccattgtttaatgtacttgaccttttacttacattggtgtaggctcatggctatttattctaaactttgagtcttataacccaatattttgttttattgctcaaattgttccagatttagccactggatgttctttcatttgacttctgtgtctctttgacatatccccaccattgtgttatttatttattttagcacttccttaagctctggcactacaagatacttcaggctcatcttatataatttctgtcccagtcctacaatcagccgtttctctgaggatcctggttcacttattagagaatgctttacgctaagatctggatattatgtgtcctggttattaccaaggtataattgcttctaggctctgtcacctgacagagcaaccaaatatatgtgtatataccaacctgtatatatacacatttctataaatatcactatatattaccatctatatctatatgaagctaaacatgagttcatactgatgtgtccaactgtaatccagtaccactgggatcattttagccttctacccttctttctctgaaaccttccaccccaacagtgagaaatctggctcccataatctctaattaatttacataattgttcagttccagaatacatggaaagcagtatcagaatagttaatccatacctctgtgggacaaattaacactaattagtatttcttctctcatttttctttctgcattataacaaaatgtttgactggccagagagatctttagtccctcgtgaacatcctgcagagggaaaacccaccactttggtttctttcctcatgagaaaatttctctgaggatccgtcacacatctgtttgttggtccaatcaatgaaaaactacagccaattaaaataaaaataagagataagctacaatttttactagtactttttcttcttagcaaattgaactctgatttggacagtgaggaaatgcattccatgttgcagaaagactttttgtcaaacaaaggtttgctttttcctttcatatttttgtttctttatgcatttacttcacttcacatacagtatacgttttactaagatcagaagtagcattcgttattgctgatatgtcttatttacgtaccgtttattctccacaatcttttacactgtattagttatatttctcccatttcattatttatttattttttgtcctttccaaactacagttttatagttgataggctgtgccacaggtttttttttttttttttgactattcttctgccttctagaatcaatcaacatttatgattttaattttttttaaagtaaaaattttaactgtaccaaattgattctaatatatttccataggcccaaactgcattaaaataatgtcaaagtattgatgaaaccataacaacaacaggagttataatgagacatttccatagttcgaaaattgttgacatttttaaatcatttgtcagttgttgtttttaacatttaattggtagaatactgaataataaaccagtatgctgctcagtgtcatgatttaacaagtctcttaaatctatttttgtctcagcttcatcattcgtaagataagaattaaaaaatacttcctctctgtacctctctactgtattttatttaagaacagtttatggtcacaataatgtaaactaaaataaatataattcaagcttgtgtcaatacacatttattatacttttttatttataactatctttgaattgtcctgtgtgcctttatgttattcatatgcataaatctttttatttataatttggtttgcctatatctgaaaagacagaaaactctctgaatgagatcttagaaccctccatttgcatttcaatattcaaaatctgaagaggaaaatagaaggaagaaagtgaaagaggaagaaagggaggaaggaagaaagggagataaacaatagagcctgatttcattgtgcttagtgaacataagcaagaatcacttcagtttttagcaaataaactgtgtcactaagactgtgtataccataacaggggcacaagtaatggaaaacaaagatatgaggttaatgtgtaaaagacagtggttctatttgttagatgacttttcatgatgtctggaatcttctttctactagaaggaagacatatgtaatcatgtatcattttcttatagtaggcaaaaaaaaaaaactaaaataaatgtttattatttttagaaaatgaaactgtcagttgagccatattttcactctaaataaaaatctgaagtaactgacattgtctgtgagaaatagtctccactcaggaaggcaactttcaatggtagaaaactgaaaatgaatcaagaaatcaaaaaaatcttggttccagatatttacctagaatctccattttcccagagcacacctagaggggtagtttgcatcaattgcaaataaatatatctaaaagatgaaccaatcacattgaattgttccctaggaaaaacttgttttaatccagtattagcatttattactgttttgggaaatattgggaaaaatacgatggagcaaaaaattttccatgctaattcaccagttctgttattttttactaaaacaggtattctggttacttgtttctttccttttttcctatccctccagttgcagtaaggtaagtgctaggctgctaaccaaaaggttggtggtcaaatcaatccagttgccccataggagaaagacctggt

SEQ ID NO: 47 - DNA, 541 bp, synthetic construct
  source 1..541: mol_type = other DNA
accagctgagacactttgttgaagagtagatcgcataactctttatgttactgtttagctcaaaaatccttttcacatgactatatgtcagtaaggcacatttttgtctactgtgtgtggcttaatacataaaagttgcagcacaaattctggtgaaccaagtacaacaattacatgtagcaaaataattttgcatgcatgtcagaaccgtgaagtggttcagctgcgctgttcattcagcaattcaagatgattgtgtggatactaaataagggcacttaaaaactccatctgattctaggagtagtccacctcctatctttccatcaaccagagttttcagctttggctacacattggaatcactggggaacttccgaaatctgcaatgcctaccccagaccaattgaatcagaatctctggagttggaacccaggcatcagtattttctaaagcttcacaagggattccaatgtaatcaaagctgagagtcactattctaaaggtaaccatttaacctgttgacgttgagttgattcc

SEQ ID NO: 48 - DNA, 3229 bp, synthetic construct
  source 1..3229: mol_type = other DNA
ttgtataaacataggaaaaaagagtaaagaataagtaggatagtattttaaataacctctgaatgaatatggttccaaaacagtgacttggattatggatatgctttattttggcgggggggggggggggcggggagggttacttccttctgtgtgtgtgtgttttcctttactgtcaattaaaaaaaaaagggtatgtgtgagtactgaggggacttcaggccagtttcaaacctctgtgcaacacacaatgccagaacacaagagaaaatgtacagagtcctcaataaaatgttttctccaaaaaaaaaaaaaaaaaaaaggtcagcagttcaaatctgcctggtgctctttggaaactctatggggcagttccattctgccctatagggtctctatgagttggaatcgacttgacagcagtgggtttttatagattatctatgtgaagcagaaatattccccaatgcatggtgaaattagtcttttagactgctcagaaacaatcatttgaatgtaattactgtgactatcatgcagtgtatttaaaaattccaatttacctaaataccagaatctatcattactgaaaacattagcccgaacatagcctacctggacatcagggttgtagaagagcaggaagcttaaagaaattgtgtctgcacctttcttttcctggaccatattaatgacactcagaaattcttcttaatttcctttttattcatcttttactaccctctctttttttgaggaaattctactttatcacccacccattctgttatgtaatgtggggactagttaacaggtgtcatatttatttttcatgtttcaaggaaaatgtcttagcttttttagcttgacaatacaatttcattatccctttctagagtccttagctttaagaacattcagattctgtgctctctccttaattgagagtgtttagtctgctcttgtatagcattttctatgacatttagataattgaattgttctgactgtatatttctattattgcatttttttcaatatctaaaataaaaaatgtacacagtattattaatacagacatgtcaaaaggacacgcaaacacaattttatctatttcttattatccttctggataaatgttctgagagttgttgctcaattaaattccatcagcctcttcaaataaggtatacaatgggatgacaatcactactctgaggcaatgtgattatcaagaattatacatcgagtacatgaattgcagaaaaagaaggagaggtgagtgggaatcatcttaggttaaaaaaaggaaaaattaaaaagccaacatcatgtataatcacaggcctttggttgacaatttaagatttatcagcagattcagaaatttccttcttttggactcagttattctttcttaaataaatatctttctttcccaagtatgtacttcagcaatttctttagtgagagtctcctggtgctaaaatctctgcaatttgttcatttaaaagttttgtttatttcaccttcattatttataaatcattttcttgctacacaattcagttgtcaggtcaataggttttcttagtatatagtcttctggagtctattattggtttaaagaagtctattgttgatcaaatatcattaatttgtaggtaacaccttttctctgattgtctttaaaatctgctatttttctttcatgttgtgcagtttcacatgggtaaattttaaaggtgttatgttaagtgttaaaagttagacaggaaagactatgctttaatgtatccttggtgtttcttatatgcagctaaaattgagcaccattggtaaaatattttagccaattaccttacttattaaggtacataagtgaatgaatcaacatttcttgatatctatcaggttccaagctgtttactgatgtacataacttaatcttcacaatacgtgctgacattatttatcacagatgctcagatgacaaaatagaattaataaacatactcgatgagctagtgagtagaggagctaggatttgagtctacttctaaaaccatactctttttataattcccaatgcttgcatacagaccttttgttgtgtggtattgagtggattcccattcataacaattctataggacagagtacaactgtcacaatgggtttcctagtttataatgtttatgggaacagatagcaaggtctcttcttacacagagctgctggtatgttcaaactgctgatctttcaattagcagccgagggcttaaccattgtgcatccagggatccttgacataggcctaaatctcacttaatagggatataagaaacacagcatctcacaggctaagtgccaaagtagttgagagtgcttatttcatcctccagaagtggaacacagacagcacagagagtgaccatatctgaggcacaaagagaagacataaagatgctattgaggtacacactgagaaaaaccttttgactaaacaatcttcgctctaaacacaagttaagactagaggaatatgaagcttgtgatgcaatcactaacggtattcatagcaacaataagaaataggtgacctgaatagtcctttacctattaaagaaatttaatctgtagttagcaactttctatccagaagaaaaaagaacaaaaccgaacacaaacaagtaaacaaaaaaataaaacaaagcttcaggttcagataactgtactggtgaattctagcaaatgtttaaggaataatacctacccaaattatccaaaatttagaggcagagtgaacatttcccaactcattgaagatacaactggggtaatataaaataggagacatttcataagtggattaaatggattttttggtggtttttataaatggatagaaaaagaatgagtacaatctcactataggggctcaagagtggacatttgtgcccataattactgaatttttggggggaggggaaggaaattgcaatttcaggatgtgattttaattagtgtaaacttcctcttcaaatttatggcatcatattttccatttcaataacaataagtattttttaagtttatactacaccgtctaaatgccatggaaaggtttaaaaagagtattctgaagccaagggtttcttaaagttcacgtgaatatttgttaactaagagctcttgtcagaggcggagccaagatagtggaatagac

SEQ ID NO: 49 - DNA, 2916 bp, synthetic construct
  source 1..2916: mol_type = other DNA
acttatgcattgctggagattgtaaaaaagtgtaaccactttagaaaacggtttggcagttcctcaaattgttaagtatagatttatcatgatccaccattttcactcttagatacatattacaagataatttaaaacatatgtccacacacaaattttacacaattgtgcagagtagcatcattcctaacagtctaaaagtagaatcaacccaatgtccaccactgatgagaagataaatgaaagtcttatatccatacaatagaatattattcggtcataaaaaggaatgaatcattgatacatgccacatgaatgacttttgaaacatgatacataaaataagccagacatgtatgatttcatttatattaaatgctcagaataggcaaattcatagaggcagaatgtagattaatgcttatggtagtctacatggatggggaatgaggagtgactgccaaaaggtaattgtgtttctttttgaggtgatgaagacattctgaaattagtggtaatgggttcataactatgtaaatacactaaaagtcacaaattatacactttaaaagggtaaattttattgtatgtgaattatatgtcaataaagctgttattttgaaaaataatgcatatgatataattttattcacataaagctatagaaaatttaaactaatatacaatgacagaaaacatgattatcatggaaatgtggtagaggtggacaggagggaagaatcacaaaggaataatagaatccatttgtgagcgatggatgtgtacctcaccttgattgtggccatggtttcacaggtgtatacatatgtaaaaacttctttcaagacgtacaattaaactttgcaaagattgttgtatatcaattatacctcaaaatagcagttaaaaatttaaaaattataattaaaaaataattcaaaatataaatgatgccagatatgtaacacatgagatcattctatgttatgtgtgtgtatacatatatatatatacacacacacacaaaacaaaaaaacctgttgccattgagttgattccaacttgtagcgagcttataggacagagtagaactgctccatagggtttccaaggagtagctggtggattcaaactgctgaccttttggttagcaggagtagctcttaaccattacggcactagggtttccatgtccacatatatacatatgtgtgtatatatacatatatacgtatgcatatgcacccaccgccatcaagtcatttctgactcatagtgacctcatacagtttccaagagtgtaaatctctatggcagcagactgccacaccttttttctgaggagtaactggtggttagcagtcgatagactgctttaaccattgtaccaccggggcttctgtatatatatacacatatccttaaaaaaaaaactagcttctagccagttttacaacctagaaatgtttcctcatggacctgggagccatctctaacatgtaaccatcaaggaagctatcacccctatattgcagtttctgtgagggttgttattgttcttcatagttgtcatggagtagattcctactcatggtggtcccatgtatgcagagaagaactgctccatagggttctaaatgtgcctatcttctttctgaggcacctctgggtggaatacgtctaacctttagcattactgtttgtgtcgcccagggccttctgtgggaaagtaggggcctaatttagtatgagtctttgctttgagttacaaaactaccataaagatatgagaaatacctttttcctttggaaaaaggcaattggcaaacacaggttattacccagattactagataaatttaggatgaactatgtgttacaaacagtactgttttgtcctcttatatgattgatgaaggtgcctgtgtcctggaacaaatatgaaattggactttatcagggacaaaggccttcaaggatctgtattttcaccttgtgtttatttataattttaaacttgcataagtgttcatttccatcataaaaataaaatgcgaggtaaactaaggagccaaataaataacagtgaacacgaaattcaggaagtctggaaaggttaggagttttaaaaaattggcatatcattcacagaaatacagtgtttgcctgtgaaacaccatggtgccatagaaaataccagtagtatggtaaagtagatggtgaccagtttggagataggaggtattgtccaaactatagaacaaaaagtattttaaaaccttctaaggccttacaacgtatagaccgaagcaaataattccatagttccttcagaacaatgaagatttaataactaagaaaatcaatagctttcttttctcgacaaaggtaataaaaatatttaataacctactgctgcctagttgattccaactcatggtgatactatgtgttagtgagtagaactgctccacagggttttcttgatttatggaagtagataaccaagcttctcttctgcagtttccctgggtgggttcaaactgccaatctttaggttagtagtcaagcacaagctgtttgcgacacccagggaactaaaatatttaatacttttttttttaacttgagtcaaaatagttgttgcctcagaatttcctgtaatatagttttatgaggaattgtcattgatctgtaagaaataatgctttgatgaattagcagggatgagtgtgtgaagtgaaaacacagacatgagaaatatattgaacttattatacaaaataattatgtgtgaatttcagaggtaatgtctgtctctgccttctgtgtatttctcttatgcctgcttttcttccttcctccttgaaggagaaacttagacctttcgaggagactttgaggtcataatcccaa

SEQ ID NO: 50 - DNA, 726 bp, synthetic construct
  source 1..726: mol_type = other DNA
acttcaaaatgacatgatcaaataatttaaaccctggaaaacacttgccaatttaagtcttttggttatttttctttagttttgccgagtggttgcagcttctgactgtggtagtccatttttcctgaggaagagaaatgcagtggatttgcagatgggctcctataatttaatgtcttggaatttctctgataagacatgattcacgcactatagaatactgtatgaaattcctattcataggtctatgtctatcacaattctcatttgtcaacactgtaatatccttttcaaagatctttttctttttttccctcccaaatctcaaggaatgtataccatcactttgcctctgtttttccctgtgaagataattatggacaaaaacctaaaatttttcatgaaaaacaacacctctcaccatcccccaaaatagtaacctgatgatttaagaattaatgccagtatactcctaggcaaaacaagaaataaagaggagccagaagagtacaattttttaacctaaagaaaagaaaattgatgttataagttcagatcaggtaatcggctggcagagttttaacttttggcagtcatgtgtacagccaccaatgagcccaatgtttttcctcctggattccttgattgtgtgtgtgtgtgggggtgtttggtcttgtgtgagtgtttgaattattggatttcaaatacaagtgcatgttccagacc

SEQ ID NO: 51 - DNA, 657 bp, synthetic construct
  source 1..657: mol_type = other DNA
caaaatcatcagctgattggactacatggtggagtagggggtagtagatttgaggagagaaggaaatgcatgaataattgtttgaaatgttggaaactaaatattaaacaagcatgatgtgaattgtcaagtaatgtcctgttggtgactgtttgatacctgtctgagggcaataacagaaagtgaagcaaggcagttgtgtttttctcaggtctcattcacatgctcggcacttatgcagggccagagtaaatgataactgggtgtaatcagagttatgcttttataaatgaaaattatgatgaaggggtgggggagagggggatttagatttagttgcaagaaaattatatgacagtgtaaagtagaatcttaggtgggtagggagtgaaaaaaaatattgtgaagagtgagtcatatttcttgattaaattaaaggttaacatttatcacaaactgaataggtgtgttaaacgataatgttactgaacagcaccctgagcttcatgtttttttttttatatttcgtattagcaatggaagggatacaaaaatagaaaactaataatgctcacatttattccctcagtaacaaaggagtggtttaagaaaaacaagtcttataatatacaggagaagtcttaaaattaactttga

SEQ ID NO: 52 - DNA, 1243 bp, synthetic construct
  source 1..1243: mol_type = other DNA
ctcatggatgggatgcaaaagggagcttacagaagatgcagttcttgtcctggagtagctcatcctcttgataggttgaaagaggaccagaatgaagtgttcaagtggaggttcaaatcctgtctttatttaaaatttcgatattccatttattgtgcacttttgcattattgaaaaaaatttcaatgaaatattatttatcttgattatcgagttgtttatatccaaggtatgtacctcattgattcatgctaacctgtgttaagagctaaatatatgttaacaacgttatgaggagcaataaaaatgatacgatggcattggaagcctaagtggctgtgacagttcttctagtcttggaattattgtaggaatttttaggttagtgccagctattacccatggtttctcacccaaaaagtcaaagcagagatgtatttttctcaacatcttctatgctctctcctgttactagtaccaattatttattgaagtaagcctttctttttctcttacaattaacctattctctcccccactccttaagtttattccacattggtgcccaggagactctgacattaagttgtctaaacccatagcatttcatgctcttaactacccactgtaagcttctcctgcaaagagtaacgaaggagaaagggagtaatgtatctccactttagagcatcatgtaatttctttgacttgtgcttctttctctctgtagctatcttttctcctttacctaaaatgcaaattactcagttcattaatctctcaactcctttgatttttcctctaataagagccagatatgacgatgaatactttcattatttccatcatgaaattctcaatattatactaaaaaaaaattgctttattttaacatctgaccagggatagtacacgaatcattcaattcattttacttgaaaaacgagaagttattttttaaatgttttcaaaagcttgaaggaaggggggcaaacatttcaaaaggattaaaatcagtatatttacagagaaaaatgtaatttatattatctagatacacatttcatttttagatatacatatatgtacgtatagatatgcaaacttaactttcttctgtttggataaaatgcttacttcatataggttggtcacattttcacttaccaggtgaatagctcatgagtaaatttgtttagctctgagtcaaaggcagtattcagagcttaacaatgcagtcaga

SEQ ID NO: 53 - DNA, 673 bp, synthetic construct
  source 1..673: mol_type = other DNA
tatatggatcttaaaaagcagaatgctcaaggcaaatatatgaaaaattttaagtaaaatattttcacttatgatctaaattcaagttgaaaagattgtagaataatgtttgacaaaatgtatggagtacacttggtaatgtgtatctgtgagctacagtttctcatacagaaatataagatgggttttttgtttgcttgtttctcttttgtttttgttcttttttctttatttgattacttaactgcctctcaagttcttagttggattttaacaaaagttttaatcctctgagtttcagtttattcatcattgaaataaagcagatcattaagccaccatttcaaaactgggctttctgtagttttaggagaaaaatgttctcataaatacattgtgctgatagaaataagtcattatgatgctatattatacggttacttaaacatgtatgaagataagtggtgaaatttttgtgtttgtagctcttagattataaaaatatttttaaagtatgaaggaaaatcaaataaaatatttttatgttcaaatctttatttaaatatcattttccaaaggttcatttacagatgctagtaatgataacaatagtaagaaaacaatgttaagcagtttcctttgcaaacaagatacttattttcatcattattta

SEQ ID NO: 54 - DNA, 5227 bp, synthetic construct
  source 1..5227: mol_type = other DNA
ccaggcgattagctcataaataaattattttagctctgagtcaaaggcagtgttcagagcttacagtgcagtcagaataaatgcttaccatccacgctatccacactaaacattaataaatttcaccatccaatcagctttggttggtcctgggtgtagtacttcactgtactccctgaagacaggaatattctctccagatttgtataataatgggaaataaacatcatcaccaacatttatattgaaaatcctttttttttctatccaaaagttgtatcctctgtggtctcggaggtggaaattacatataagtttgttgtttaatttttcatggaatttgaagtgaaataactgagataaagttatctcattccttgttttcacttttttttttgtgggaggagagatatcccaaaggaaatggcagccagatgtgccactgaaactggttttatgcttctcaagttctgagcacatgggtatgtcatggttaataattccttataccatgtggattttgatcacaatccaatgttccatattcattcggtattgataggccataaagcaagtgctttatgttgtaactaattctgaggaaccagtggggtgtaaggtctgagcagagacaaaatggaatgccaaagaaaacttagggcagggaaattggacccagaatttgaattttggtttaccccataataagttgtttgaaaagtgagtggactacttcctgtgtgttatttcaagtccaaatggccacattttgctccaggccctgcagtggcaaccagttccatgtaggtgcaaacttacagcccttctgcttgctcacccctgatcaagaaactcctgctgatgtccttgggcttatctgacagcagcttgggatactgcaggcacccacaggacatctgtggaagaacaatccggaagtatgtggaaattacagcctgatgaggcacacttgacctgtaaggacaatgggatctgatacataaatgtgtcccctctttgtcctcaggcagacattctgagataagtttcataaggtttccgaaggtctctcagaagagatgtctgtcacctacagcatggccgacgatatgattcatcttcattttggccctctttccttccctcctttattccatatgtcccatatttctgccacctgggatcatttcccaaataaaccacttgtaggtaagtattgcctcaggctctgattgtagggaaaccaaatccactttaaaaaaaattttctttttggtttagcccaccctctcagtccactcaatttttgtttagaattgacagagttgatcacctttttctcctagatgtcttctgtgccttgaattaagtggtagtaaatcaactcctcatagcgactagtcagaatcaattcaacagcaaggggtttgttttttttaatcaactccccatcttacctcccttggagtttctggctgaggtcacacggatctctcattgtctatcattttagatgccctcttcttggccaggcacactttgcctttatactaacagtctactctttttttttaaattcatttcttcccatggattctgtacacctgcagtgacaattaaaaaaatacagtttattcaaattttgttttaatataaatacctttcaataaaaataatacacattgtagacattttagaaaattcagatatttatagaggaaaacatgctacctaaaatattccaaattgaaggtaacatttttgacaatttatatttcagggaatttttttcttaacttggattttaattttaacatactttataatatacaaagttacatatgtccatagttgttattagttggtgccagttgacttcaactcatgacaaccttttgcataacaaaatgaaatgatccttcatgatctttagtatgtatgagcccaatgttgtggctatgtgtcagtccatcttattgaggtttttccctcgatttcattggcactttatcaaactcgatgttctttttcagtgctttgtctttattggtaaagcatccaaagtaataaacaaagttttttcattttcacttgtaaggagcattctagttgtatttctcctaagactgattcgtttgcagtccatggtatattcagtagtcttcaccaacacaattcaaactcatcaacatgtctcctgtcttactttttcattgtcaagctttctcatgtatatgaaaagcacttgaaaataccaagggtgggtcaggtacaccttggtcatcagagtgacatctttgctttttaatacttttttaaaaggcccttgttgcacagtggttaagagcttggctgctaacagaaggacggcagttttaatccaccagcagttctttggaaactgtgggacagtactgctctctcctgtagggtttttatgagtcagaatctactggatggcaataggtttggtttttgtgactggtatgctcaatacagtacataagtggttttttgaatgctgcgtccatggagctcctgggtggcacaaatggttaaacatttgactactgtgaaaaataatcaaaactcaccaaaatatgaacataatatttattctgagcaattattctgtattcatagctgtaggctgtatggattccagaagaagcaaatggctccaagaagctagctaccgtggagcttataaagagaacaggagggagacatgcagaagattaatcattgactaatcttaaaatgattgattgaagcctaccccccaccccctttactgagatcaactgctatcagtttattcctgcctgtctgctaatatttttgccttcatccacctgcaggcaagagattttgaaatttatattaagaggtaatggtttgttgactattcttttctagcagcttaagacaaatatacattgctctagagcagtttctggcaggatttttatggttgatgtttgattttgtggataagaaaaagcttaaaatcaaagtaagattcctgttattaatttttctcttcaatactactaatggaaatgttgcccttttgaactcgcacagagaaaccttggaagaaaggcccagtcatctgactttgaaaggtcacagccttgaaaatcctatggagtgtaattctattctgcaacactaggggcccccaagagtaagaaatgactcaagggcaacaagtttgggttttggttttggcttccatgtatattgatttgtcaagtaagtagaatgaaatcaccgacaagttcaaattcttcatttattattatgttgtttatagatatacttgtgcagatttttgttttctcacattcatgaatatatacgtaacatatgtataatcctgttatctggtacattctggtacatttccttccaacctttttctatatatttataaatgattgtgatcgtcacttcctaacagtagtggggtccccatactctcagacttcaataaaattcaaatgtaaagtttgttcatgaggctctgctttctagggctttttatgaaaccaaatatcttaacttgggtttcctaagaaacagagactaagcaaaatcttattagctaaaagtcaggcatgaggtaaaatggaaataagacaggtaagatgagaatgtaaattttctactcttcacggtttggcatcaaaagaaaatgtttcttccacccaccggattatcttcccagaaagctattttatctcagaccttccacttgaaggaggaggagagaatgtcccactgtccaatgtccattggtcaacagtgtctctacagtccttaaatcccctcaaacctgaatcacacatgcgggagcctgaacagggcaaccttaacctgtgttaaaagatgaagtgcaagggacaggtgaggtgctgggatttttaagcttttgcatttttatttattgagctgaaatttaacctaaaatgaaccgtattaaaacatacaaatcagtgatatttagtatatttacattgttgtgcagttataaatttatttatttatattttatatttaccaaaaccaaactcattgccatccagtcgattccaacttacagcggccctataggacagagtacaactgccccatagagtttcaaggagcgactggtggattaaaactgctgaccttttgtttagtagtcgtagcacttaaccattatgtcaccagggagtacatattttatatttagttattatatatttatatattatttttcatttctttcctgttatttttattttattttcaataagtttttttttttatatataatgtattttactatcttatctttatattacagattattcagaggtattagagcctgaataccactaacgttgaaattaacattgtccagacatgtctaccaaggtttttgggatatggtatatcccattgttggggagaggatgaaaataggtaggcagaagcatcttgtccagtgaaagcagaaacatgttgctgcttttttatatattcttttttaagtgctttcaaccttgtttatgaaaactgagtatctaaaggtgttaaatatttcactaatttacctatttgcctgaactagaaaatccaccctcctatcttctgctctttgatgctggcacaggaagtataaaactatctctctcctctgcgaggtggcttcctgttcctataaagaggggttcactagaatgagattaaaaatcaagagccggggagaagagaccgcattatagtgtcaaagtatggagaacttgaagcagatatctgaggagaatagagtaaaaatgaatgcaaagtgtatatcaaaatttacctaaaagcaagaggtttgggcaaatgctaaatatattgagctctgacctgtggttgtctttcacataatctcatatacattttgttaccattctacatcaattttaaggctcagtgttgatctttaaagtgaaatttaaaatgcccttcatgcaaactactttccttccaaaaataatggaaagtaccacatcttctttatggcattcttcatctctgcatttctcagtgagtagatcagagggttgaacattggagcaaggatggtgtagaaaatagaaagcactttatcttctggaaatattctacttggtctaagttaaatgaagggaacaggcacaaagaagaggactacaactgttaatgttag

SEQ ID NO: 55 - DNA, 669 bp, synthetic construct
  source 1..669: mol_type = other DNA
gttgagagtagaattatgggtggtaagcgggtgttggagcaaacagctcttctaagggtaacctaaagcctcagaggtagtgatctgcatgggaaatgggataccaatgatgagctgtatacaaggcgagcagttggaacagacatgcctcatggggttaggattgccgcagagctaaaacctctgctcaattacagcatagaaaaaaaaaaaagaggaatagtctatctagctttgattcatggaaaagttaaaaatcttattttactaaaaaactagagttagagctgccataagtcccagaaattccactcttacatatataccctagtgatctaatagaagtgccatgagcagacacctatgttcgttgcagaactagtcagaatcccaaaaagatggaaacaacccaagtgctcatcaatggatgaatgaataagtaaaatgtggtacatacatacaacagaatattactcagtgataaacaaaaatgtgccccgaacacatcttacaacgtggatgaatcttgaggatattatgttgagtgaattcagtcaatcacaaaataaaattgtatcactcatttttatgaaattacatgaataggtaaatgtacagaaaccagtgttcattactggttaccaggggtgagagagagtgagagaaata

SEQ ID NO: 56 - DNA, 604 bp, synthetic construct
  source 1..604: mol_type = other DNA
tgctccatataatgacagcgacatacagtcgtgcaaaaggacagtcactataattagacacaaagcaaagactacttaccaatatacccgttcctttttttgttgagcaacttccacgctcagtcagtcttcagaatggtttaaaaccgatcagtcttgtcattttctagcattcgcattgttacattaggaaaaatgttttcttttcttttttcccccttcctactgtgaaactttgggttcgtagctccccaggatcaattctgaacaaagcctccagctgcagtgccatccaatttgaagcagacattggggacaatttaaggtttttatccacaagaaggtttttttccattctcttaaatgcagccataattagagtaatttttcatgtagcccgctgattacagcgtttttaccgtcaaagataattacctgtaattttcttccacttttaatactaaaaagccatctttatttagattcaggaacaggaaaggcgaaacaaaagagggaaattattctgttattcatacacaaattgcagagacgtaggacctaaaattgaaaattaaccaaaattataatgctgaaaagaatggaa

SEQ ID NO: 57 - DNA, 1871 bp, synthetic construct
  source 1..1871: mol_type = other DNA
tacgtgatctcacttgagctttatgagactccagagatgatatacatgtcaaattaaaagtctggatatattttggacaattttttaaattgagttaattttatttaactctttcatcattctctacctgcgtacagtaatcacatacacagtattaacaaagaattgttacacattaattgcttttgaaacaatataacttctaagtatgaaacaatgaaatcaagatgtgcaaaagagctatgagagttctaattaaactccggcatatttgtctgctttggccttagtttcttcatctgcaaataagcaagttagagacaggtcagagttccaagctcaacactgctgcttattggggaacatttagcaagttacctagtgtttctgactaacatttattctcctgtaaaactgggatgataatatctacctttcaaatttttgtgaaaataaactaagtaacatatataaagtgcctcgctctgtgtctatcatagactaagtaattatataataactagtttttaaatttttattattctccctctgggatccaaattattcaacagacaggagctacatttttgttttccccaaatcctaaaatggcctggatagattgaatcaagatgagggactaaacacatggccacccaaattcccaaaacaacaaaaattgtatttgtttttaaaaatgtggaactactgaaaaacaaaagtagtactattagaagacaaattttgagaaatcctttgaaaactgaaggcagataggatctacctaacacagtacaaaacatggagaagattactgggaaaagtagctctgtgggtgttccaggtttagaaattacagattccagaaacagcgaggttctttgagaaacctcacttagtaacagggcaaatgaccgtaatccttctgatgtctccattatttgtgcccaactatgaggcgtttgccaccacactagaactcatgcctagtccatttggtctagagtagctggcagtggaacaccctgtggatctgggtggctggcggaacaagaggcccctatgctcagaatccaaaccagctattattaatataacccaactaaaagtacaaagctaacaagttccacccacgtactcagagcttttaaccaatgtttttaatcaaatactattaatcataaacagcctgagattgctaagaatttgggaaaattctaacattagggataggagcccaccccccaaaaatatacatatgcacaatcagaaaagagaagagctttggagattaaaagcttgataacacaaattagaaactcaatagtcaaggtttgagataaagttaaggaagcctcctagaaagcagagccaaaagacaaagagatagatggaaaacagaaaagataaaagttcaatatccacttaggagttccagaaagagaaaaacagaaaaaattgagtaaaacaatgaagtaacaattcaagaaaatgtcccagaattgaaggacatgcatttcccatacgaaagaacccactgagtgttcagcagaagagatgaaatcagactgatgtcaaagcacataaaattgaaatttaagaatactggggacaaataaaaaattcttcaaactttcagaggcaaaaataaaccacagaatcaatgattagaatggcctcagacttctcaacaccaactctagaaacaagaaaatagtgaagaaatgcctttaaaattttgaaaggaatttatttccaatctataactctatacccagccaaactatcaatcaagtgaggatgtaagaaaaaaaaaatttttttttcttcttttgtattttaatggctaggtttgttagcttcctttgtgg

SEQ ID NO: 58 - DNA, 662 bp, synthetic construct
  source 1..662: mol_type = other DNA
actccataacttttcctgtcaacgttttcattgtgtctactgtctctgcaaggacctctggtggtgcaatggctaagtgctcagctgctaaccagaaggttgcagatttgaacccatcagctactccacgggagaaagatacggcaatatgcttccttaaagattacagtcttggaagccctatgggccagttctattctctcccatagggtcgctatgagtcaatatccactcaaaggtagtagttttggggtttttttattgtttcttctgactgatatcctttcttccaggcaacagtggtcacttaatttgcatttccatgttttggtgaaaggccctgaacatagccacttccccgcccagaaagcattttcttcaggtggaccccagacaggtcaaacggacaaacacatttctcttaggataagatcgctactccctccagaacaaggaacccacaccaggaactcaagcagctgtcttcaaacggacactgagcagaatgggggaattgagcaagggtaagtgaaaacaggagctgtggtggtgtagtggttaaaagcgcttggctgctaactgaaaggtcagcgattcaaacctaccacctgctcctcagagagagatggggcagtcagcttccataaagaatacagccctgg

SEQ ID NO: 59 - DNA, 1180 bp, synthetic construct
  source 1..1180: mol_type = other DNA
ttttcttttttttaaattatgcaaatttgtcttatctttagtgaactctgttgctaaatggctgcagttatcagcaatttttaaaattttctgtatctttgtcattcattgtgtgtttgtaaataagcctgatgaaatatttcctgtaaatggtttgtactagtacattagtatgaaatcagcattgaaatttaaatataatatgtttgcgtatgtatatatggtatcatccgcttatttagaactgatggttttactttacaatcttgttttacccaaaattaagctattgggtttgaaagccaaaaggagcacttttgtagactagcagatttccttctcctcttttttgattgtatggtggtgacctatttttacaaattataatgttaattagtaaagttagtgtcaagtaatgacatgcttccatagtacctgtatttcttgtgaacctgtagagagcaggtatttatgcctggcatttatgatgcagcatataaatggtgggcagtaactgacagtattgtgtgcttgctgcacatgtctgatcttttggaacagattttaagtaagccttttccagaggtaaagctaggtctttattctaattttattcctagggcgaaatagacagggataacttccttgaatctattcccaaattaatatttttatcttcagtgtttttacactttaaggccatttggtgcaatttagaaagtgttggcctcctttcccttcgccacattcaaaattaacttccaaagcctcaggagccgttaaaagagtcaaaaccctcaatatggcagcacaacacgatggctgtaatgtatggttagggtataaccaaaacaagttttcctggtggtcttgtgcactttaatttttgttatagtgacacttaagaggatgaggaagaaatctagttattaacacttagggcagaaatatctgcattattccgttttttgttttttttttaactcttttacctctgcaaacattttcctgtgcagatcactacttcacagttgccaaactttaaaatatttgacttctgaaactcattatcagcaaagtaatgttactttgttctgtttctaattaaccttagcaaatgtgtataatgtcataatccaatagtatttgacagtacttatgtatacaaagtttgataagc

SEQ ID NO: 60 - DNA, 693 bp, synthetic construct
  source 1..693: mol_type = other DNA
tgatctaggacagtatctcgtgggtaatgttacaagacaacccacacaagcagcctgtgactcacaaagtcctacatatctctttcaagttgttttttaggaccccactatggggttgggatcttacatctctctctcaagttgcttttcaggaccctactatgggggtggtgtcctgcatatctctcctgtaagttgcttttcaggaccccaccagagggggtggtgttacaagataacccaaatccaggactctgacacatgaagttccacatatcttccctacaggctgttttccaaagatgaacagaatcagctgatgcccagggcgtgtgcagtgagaatgggtggaaccttacactcttgtcaagtgggtaccaagactgtgcagtggtgaagtgacattgtccgaactgactccaccttggattccagaagcgcaggcacctaatttcttaacccctgtatttcttagaaagccccacctttttctccaaaaagcaatgaataaaacatgagatccttcctgccgaaaaacccttataaactccaggaaaacttccattcagggagagactggaggctagcgtgggcagaaccccctgtccgtccctccctcgagagcctttgctttttttttctgccacaaataaacctttgttcctgtggaactgagacagatagggttaactg

SEQ ID NO: 61 - DNA, 590 bp, synthetic construct
  source 1..590: mol_type = other DNA
atccagtgggtagaggctaggaatgttgctaaagttctacagcttcttacgacaatgatttatccagtccaaaatgtcagtactttcgaagttgagaaatcctgttctgatattaaaaatcccatttgtaagtaatgccctctgcaagtaacacccaaaccaatcatttctgtgggccccatttactaccaccggacatgttgtctccagatattaacgggggcatcaggacatttgagcagacaactagcaagcctcatgtgtgccagtccttggcagccagtcctaccagagctgagtcctcaagtgcagacattttgtcctacatgataaactctgtaacgttccactttaattcaattcgtctcctcttgacatcttttttaaatagcagttccaagtgaaatcttattcaaaacctcagttttaaaaagaaaccagctaaaagcagaactatgtggttgccagggtctgggaggaggaggcaatggagagtgactgctactgggtgtagggtttcattttggtgtgatgaaaacattcaggaattagatactagtcagcttctgtaaagattacagccttggaaa

SEQ ID NO: 62 - DNA, 1456 bp, synthetic construct
  source 1..1456: mol_type = other DNA
tccccctcaggctggcattaccctccagggaccattgttaccctctcctgccaaacagcctccagcccaacagcacagtgttcttgatttatcagtgggagtctccatcaacccacacaagagatctttatccccaacatagcactgaatgatagtggatgctaggactgcctcatccataactctgccactggcctcagtagaaccatgacaagactgtaacagtctctggaaagtagctccctggaactctcgcaatgagctcaggggtggatgtctgtctggttctcagaaaaaatcctggaagaagctatttcccagcctatgtcccctgggcacacaaaaatcccaaattctatccctgagcattcaactatttctgtgcagaatattccttcccttgctcttcttatttctcagggcagaccttgggtccagcctagaatgcaggaaggtggttctcttagccccagatagttatttggaatgggaggggactccacaaagggtagggaagaatgtttccagagtcaagttgctcctctccatcactaactgtcatctcagtttttgttcacagattccatgtgctacgaggaacatacaaggctgtggaaaaaactcatgcttttcccccgaagaagaggacagaatagccaccagtggggtgacaggcaggacaggactctgccttcctgctctgctacctgccttcccctggtgcactgaccctgttctgacaccactggcgattagaccagtgagtacagaggggtgcacatgagccttgtcctaatcttgctaaaaagtatagcccattgacaccacagcagaccaggattatactgcagggaaatggggaaaagtacaagcttcagggcagatatgtctgagcctgtcccagctctgaagttacagctgtatgagttgtgtgataccagcacagatgatacaaaaaggagaacaatgaatcatgaatcatagttggaaaactagatagatgcacccatgaaatcccttcatggtgggaagggccaaaagtatgcagtttatagagagagttaacagtaccagcctttggttagaaccattaccgctcctgtctagagattcccatcacctgaaagtcagtccacagaccaggaagcaaaagtctttttcaggttaacaaatccttcagatttaaatctcttcagttcctaaagttttaaagactgggcttcattcccctgtaaattatttaacaataagaaaaccctttccttctgcatgtaaagctgccctgacccagagatggacagagctggcagcctgccttccccacatacaccaaagtgtttactagagaggtggcctgatctcttataaagtcccaggatgccctacgaaagggccacacaaagttccaagagtgtcgtgaggagggtgtcgcaacaactactccaaatgatttgtg

SEQ ID NO: 63 - DNA, 898 bp, synthetic construct
  source 1..898: mol_type = other DNA
tcaatgttcttttttttcctttgaattttcttttctttttcttcttttccttcccttcctttctctttccttctctcctcccctcccatcttctctcctctgctcttctttttttgtttgtttgttttactcttgtctcccttttccccttcctttcatttcctttcctttttcattctttattttctaggatgggctctgtgtttatttgtaatggcttcccagaaagcctcctgagtaaattcaggaagcctcagaggttgaccttccagcactctttcactagaagtagtctttctgaagatttcttaagaaagctatccccacttaacacattaatatccccattacctgtgtatagtaattttttaaatataatttctctgcttcctgttttgagtcttcttttctttcattttctactctttaggtctccatctgatccatgggtacaagtttttcctttttttctgcttaacattcattaatatacataccatgacaggtatatattatgacacatatacaacaaaatagttcttataatgcacagttttatcctatgtccaaaactgtgtgtctgtgagttacaggtatataatattatttttataagaagtatgcttattcctaatgtgaaaaagatccagaagatttattctgacgaaatgtccatacagaaacattcaaggacaataataaaaaggtgttgtttattgattctttatcaggatccaacagtgctctaggcactttacatataaaaacacacacacgcacaaatttcagagatatgtactactggtttcccgttttacaaattatgaaactgaggcacgaagaggtttatgaagttgcacaaggtcacagatacagtaagcggtgaaggcggaattca

SEQ ID NO: 64 - DNA, 506 bp, synthetic construct
  source 1..506: mol_type = other DNA
tttcctctaccagaacttcatctgattctttattttggtcacttgctgaagccctcttttcctgctgtgtcggagacattagggtctttttttctttatttattgattgtatatttgtttgtttcattctgtttttctcttttgttttgatgtcatgatggataggctggacgtgcttgctgcttgcttgttgtgaaaacgatagctctcaccaccttgtctggtgggcagagcagcaacagtcaggggaaggccacatctttctacactgatttggtgaggtgggtgaaggtggcctgggtgcatgctatttgccttccaatactggtccagagttgtgggagcattcacagcttctcaccagatgggtgggggattcaaacgtggtgtggtccaggcttacttaccaccattcagcagtttgtcaattggtgggaagacatgtgcaatgggagtctgtggtggaggtgtgcctgagtatcagggatgctatggccttggcagct

SEQ ID NO: 65 - DNA, 1813 bp, synthetic construct
  source 1..1813: mol_type = other DNA
tttggtttaatcagtgagaatattagtcattatctaagtgagggtagtgagctaaccattgtggaaggccaattttgaggcatatactttgttaggttctttatatgctaaaactctcttaattctagtcacaagtattgttagaatgattgtgaggatggcacagggtgaggcagtgtttcgttctgctgtacatgggattgctataagtcagaaccaacttgacagcacctagcaataacaatattgttagtaggcttttgccccattttctacaagaagaaaacaaatctcaacgaggttaagcaacactgtcaaatttttagactatgtctcctttattcttttcacttcacacaatgcttcctggcatgatgcaaaaatatcaaaacacagacctgttccttataaagattgtccttgaggctttcatccattgtttttgagagagcctctatctttccttcatctgtttcttgacttcagcttcccatgttactcacactctcttgattcctgtgccagagaaaatgatctcattcccataaatgtactacccttcaagagaatatgtgtacttaaaaagagggattcgatggactcaaggaatgaataaataattgttgaatttaaaagaaagtgacccataagtaagagagaagtttggaggaaaaataagcaactcaaccatgcaggtgaattgatactctgcttgggcatgaaggcagaatcttgaaaaggtaaatattgtttcttaagggtttttcccggtgttattgcatactgtgttatatgcaatatattacttgaaaaatggctgtatggccaattaagtttaggaaattttgcccaatttttttatccaagaaatattgttcagtgcttacagtgtgccagacagttccaaagactgggcatatagtgtagaacactatagacaagagtcgtgtttgtgtggaacttaaattccagtaaggattagatgagtaataaacaagtaaacaaataaatgaataatgtaagtttgttagaaataagtataatgaagaaaatagttttattaaggagtgatgcaaaagacaataactggatgtagatttgtgtagttgtttgaagtgtgtgtgtacatatatagcacagagatacatgaaatacataaataggtagataatatacctgtctgtgataaggaaaagcatgtctctttgttgtttgttgccattgagttgattctgactcatgatgacccatgtgtataagagtagaactgcctcatagggttttcaaggttgtgacctttcaaaagcagagcaccaggcctgttttccaaggaacctttgggtgggttcaaatggccaactttcctgcttgtagttgaatgcttaaccatctgcaccactcagggaccttagttagaaggctccatgtataaatcgttagatgagaaggtagagtaatagtagtagattagcaaagatgatccaaatgcagaggttgtccatcatctgggaggataatgttttgtaaaatttcctctcaggagacttacaaaatgtaaggtcaaatatgtcaatgaaacagttgcaaattcccaagtgcaaggtcaaatatatgaattaccaagttgtaaactccaatgaacaagttgcaaaagtagggtattagtatcttttttattaatgaaggtagaaaagaataaaagctataacctgaaatatatctaaattggaaacaagttatttgagaatacaatttcttatgaagtaagagagagttaatccttatttttcctggctgagatacttttttcaat

SEQ ID NO: 66 - DNA, 509 bp, synthetic construct
  source 1..509: mol_type = other DNA
cacttggtctgttgggtgacctgaagttcacctgatgctcctaaggcccatgcagaggagacatccagatacagactggagattcagaaatatgtagaacagaccccaaaatctgtgcccaaagataaaggagccctgttcctagatgcctaggcaactacctggggagagctgagtccaggaaagcccaaaacaggccaatgagaaggtcaagacgagagaatctagacaaggagtgaggccccagccaatagtgtagaactccagcccagggaaggaaggaccagataaggcctcctgacaccagctctgagcaagactgggggcaggggcaggctgctggcccctcaaccccaagcacctcccataggacaagcataaagctcagccccgtggtggcgctccctacccagacccagagacaggctgtgttccagccctcactagcccctcagtcaagtggtcttgagcagtgcaaaccctgcctcaccatccaatggcagctctgt

SEQ ID NO: 67 - DNA, 619 bp, synthetic construct
  source 1..619: mol_type = other DNA
aaaggggagaaatgtaactaatacaatctaaaacaaaagggtatggagaataaacattaggcaaaaataaaataccatcaagaatgaatgctacttcttatgttattaaacactttcctatgtgtaaagtcaagcacatgcatgaagaaacaaaaatatgaaaggaaagaaagcaaacctttgtttcacaagaagtctttctgcatttcctcgctgcccagatcaagtttcaacttgctaagatgaacaagtactagtataagttgtagtctatctcttattttttattcttggtttactttttcattgattggaccaacaaatagctgtggggcagatcctcagagaaattctcttgtggggagaggaactaaagtggtgggcattccctctgcaggctattcaccagggactcacagttcctctcgcccaccaagcattttgtgttacaatgcagaaagaaaaatgagagaagaaatatcaattagtaaacttatcagacatttggaaagttagaagtcttctctggaagacatctgagctaatctactgacagaaaagagtaataaacataattggacaagaagtacttgattcttcttttatcttcatgatttat

SEQ ID NO: 68 - DNA, 1193 bp, synthetic construct
  source 1..1193: mol_type = other DNA
ctagtacttaatcagaaatatgacaacagtacaaaagatcagtgttatgtttgataggatgttcagaaggtttggacctcttcagaatatctcatgagagagacagaagagataacatatcccaagaaaaaactaaatagtattaccctttccacttgaatgcaaatgcattttggcctcttttccgatcaaaacaaaaaagaatgcacttgtcaaatggttgagggcatagtgtacatctagatccttattagtctgttttagcaatgacaacatgtatgctacagcagctgttcacaatgagcacagcatcatgttcatagctagcactgagtttctgtttaagggggaaaaacatggcaatggatgtcagtgatggctacacaacatggttgatgtaattgatttcattgaattgtacaagtgaaaaaatgttgaatttgcaaatgttcacaataaaaatattttctttaaaaaattaacattattaacattttatgagctatgttcttaacaaaatgaaaatagtacgaggaaacttcagacaaacacaatctatgagacattctacaaactggtgagaattatttaaaagagtcaatgttgtgctagacagacagacaaactaaattaaatggaagaagactaaaaagacacaacatctaaatacattgtgtgatgcagggttgccttgtggatcaaaatttttagtggttaacagtagtaggagggagcggaagagacggagtctggcttagggggcactgagcttttgttaaggggggtggaaatatttggaaacaggtaatggtgagggctgcacaacatgatgaatgtcattaatgccactgaattcactgtaaaaatgtcactataaaaaatattgaaatgacaaataaaaaagccaaaccagttaccaatgagtcagttccaactcatagtgaccctatgggaaaactagagctgtcccaaagaattccaagaagcagctggcagattgaactactgacctttaggttagcagccaagcccttcaccactgcgctaccaggattcatttatacttatactaaccccaataaaaaaatgaaaaaaaaattataggctgttcttgggacaattggtgatatttagtaacgtttatatattaattactagtatattttttattatatcaatattctgactttgat

SEQ ID NO: 69 - DNA, 2474 bp, synthetic construct
  source 1..2474: mol_type = other DNA
gaaacgctattgcataggcaagcagaaggaccccctctaattcttccagttgtcaaggttattttgagaggtgggtaaggaggaggaagaacagaggacagtgatatggtctgttttcagaaaatagaccagaacagtggttagtccagctgtgaacagaaaaatctagctcaaacttggggagaggagtaaaaatatttaagactcagctgcctgagactaagttcccaacattcagacctcctgagagtggggccaggcaggtttcccatctctatagatgtcttcttaaggcaggcccttaggactggcaggtggccaagttgtggggcagttagccacaaacagagtagtggtgattgaacagcaagtcatcccctggtgctcgtcaactgtccattctgtgtgaggggattgctgccaaggatccagtgactcagagttttgtgcagagatggccagggatccccagatacagaaacggaactcctcatctctgatgaggagtgctctgaggcagggcctcaagactctggagctagaaacacccattcttgaacgtttctggagaagatggacaattctgagcaagctgcttcctgcctgagaagccagctttgaccatatagacgataagccttgctagaaaagtcaaggaatgggagaattgtttgaaaaagtttaaaatatgtatttaaaatgcttactgggctgacttacgggcccatggggtagggtagggtgggggtgggactgcagaagtttgggcctctctcctatgtccttctgttcacggtcaaggggctcacgtgcacccctgaaatcacaggaccagaagacaggagcccagaggttttgtgtgtctctgctgaccagggaggctggacatagccttgagcaaagcatcctcagatagggcagagcagggtgtggctgggcagggcagggcagagcaggtgggctaatggtagtaaacaggatgttgtctcctgcttgtaggtggggagcaccctgatgaaggcttattagtttcctagggctactttcacaaagtaccccaggttgggtggctcataaaagcagaaatttgtctcacagttctggagactgggagtctgagatcagggtgtcagctgtgttgatttccttctgagcactctgtcatggattgaactgtgtccccccaaaatatgtgtcaacttggttaggccatgattcccagtattgtgttgttgtcctccattttgtgattgtaagtttatgttaaagaggattagggtgggattgtaacacccttactaaggtcacatccctgattcaaagtaaaggcagtttccctggggtgtggcttgcactaccttttatcttacaagagataaaaggaaagggaagcaagcagagagttgggggcctcataccatcaatcccttccctgtttcctagattctattccctctttcccattcaagaacatagatgcaaaaattctcccatcgctttcctgtgtcatcagtttttccctgtctgctagatatctcccgtggataaaaaaatatggactgcaatcttaaaaaagaaccttaccgtgatccacttctcctttcagccaccattccatttctatgtgtccttttacgacaaaactcattgaaaaagttgtccaaacttgctgtctctaattcatcctccccatctttcttgtctgccctatcaagattttgctctccaacttctccaaagaaactgctcttttaaaagtcatcagtaatctccacattgctaaatccaacagtcacctcttagtcctcatcttatttgaccttttagcggcatttgaccagatcatctgtcctcttattgaaacattttcttcacatactcctaatttttttccttagcttactggttgattttttccccaatctctttgcattcccctcctcttgtcaacctgtttaatcttgaaataccccaaggctcagtccttggacctcctttcttatgtgtctatatcagtccttaacaatttcatccagtctcatggctttaaatctataggctcataactcccaaatttatatttctagcccagaactttcctctgaactccagactcttttataaaaccaacttcttgcatgtctaaaaaataaaacctaatctgtcccaaactgaactcctgatcttcctctttccaaacttgcttcttttaccaccttccccagctcagtaaacggcaactccatcctgccagttgctcaagataaaacccctagagtgttccttgattcctccctttctcacacatgtgtagccaagcctccaacagatcctgaaagctctgctttccaaatgtctctagaatccaaccatttctcaccggctccaccactacctccctgatccaagacttcataatctcctacctacattattgcaatagcctcctaactgatctccttgcttctaccctt

SEQ ID NO: 70 - DNA, 756 bp, synthetic construct
  source 1..756: mol_type = other DNA
aataaaatcagcaagaatcaatgagcaattctacgtgggggttcagaaagaagtccatgcagtattatgatttagagcttaaggttagagaagggactttggagtcagacaagcctactatcaaattccagttccaccatttattagctgtgcaactttggacttaaagttatttaagctttttgaacctcagattccagctttgtaagacggagatgaagtcatatctacttcacagggttcttcacaggaataaagcaaaccaagaatgcaaagtgcctagagtggtgcctggcacatagtagaggctcaataaacaaataataagtgaatggatcacttctaggtttctagaccaagtattgggagggaaagtagtgttttcataaggaagaaaacatagggagagaaataagtaatgggatagttttgcccaagatgaatttgaagtgcctgtgggaatactcagatggagatcgacatcagttctaaagcttagagaagtcagtcctgaaggtgtgagtgtgaatgtcatcagcacaataatggaggttcttgagggatgggaacaaatgaaagactccagcaagagcaggtagatgtagaggagaaggaccagaaacagaaacaagtgggcacctgtcctggacaggcaggcagaggggccaggaagggctgagaagaggtggttgaaaggagagcactgcccttacaatcctgcagaaggtagacagagctccgagaaaagactgcatt

SEQ ID NO: 71 - DNA, 1607 bp, synthetic construct
  source 1..1607: mol_type = other DNA
tctgtttagaattattttatattacagagaagtcttaccactttggctttgattaaagttttaagatgttctagaagtgaaaaatcaaaaacaatgtggttgaggaaaaaccacttagatttttctgtgagaaggccaggcgttgccatctgggatcagtcaactaagaacatgtaccttgggtaagttagcttctctgatatacagctattctgtctataaaaacagcattcctaaaattaaatatatatatatataaaatcaagattaaatttaagttagtaatgtgaaaataacatgacagagacttcagtgcctggaaacatggcagatgaggtatcataaccaacacacagagctagttgaatagacagacagacttggaaagagattataggtatgtggatctaagtttttctttcatgcattaaagaactgcatatatataccacagacacacacatacacaaataaaaacagtaattagaaaaataaggcagaagaagtagcttctttaccagaatattagtcaaaggaaataaaaaaacaatgctgtatcaactttcatggctctgtgtttcatggacaacaggagataagctacaaggcccctaaaggtgaggattcagaagaactctgaataaaccagggaatgtaagagacaacacaattctgtctgagttagctagaaattaacctcccagctcctcaagtaggtccaggaaatctgcagaaaattctttctcagtgaatggcaccaagtagagtggctgagaactcagtcaagaacttgtaggtcacgtaaaaagcccataattgtctgctggagagagaggtcccatggagcagcattgtggcactagacatgggagtgaagaagtattcttggacatccagcccaataggctttcagataactccagccagtatctgcttgcaacttcaaaatagacattccagcagagaaccaacccactcaacccagaatcctggggagataataacttattgttttaaaccgctaagtttcgtggtggtttgttagacagcaatagctgtgaagatatgagttaaaatatataataccttttattgtttgagtagatgaagttgtaataaaattagtttttgattaattaagtgtatggtacattgtcctagattatcactaaacataaagaagtgaagtgcatattgtcttaaatgatacgaagaaattgtgaaatgcaaaaataatcaatccaaagaagacaagaatgagatgaaggcgggacacggagaagataagtaactaaaaatcactacattgaatattataaagtttttttttaatttaaaataaaaacactaattagctgaaaaacgtaagtttttcagcaaacgtaaatagactaaatgttccaagcaaagaatctagactggagaaaaccttttagtattttaaattgttgttgttaggttccttcatgtcggttcctactcagagcgaccctatgtgcatcataatgaaacactgccccatttcaccccaacctatcatttctctgtttgagcccattattggggccactgtgttaatccatcatttttgctgaccctctacttca

SEQ ID NO: 72 - DNA, 579 bp, synthetic construct
  source 1..579: mol_type = other DNA
gtatgctcatagcagggcacacccgcccccccgcccagttctgctgccaagaaccatcacagcggcttctcctcccaccctcctttcccaggcaccctggaattggagaccccccaggaggggccgctttcagagccagacccaagagcagcccacccccctacccccccaccctccgccccgtgggtttctagcagcaccccaggctggggggcagtctcgagcctgacctggcagccagggtggaggggccctcctgggacaaccttcatctccaaagaaaggcactaagggtgcctgaggggtgccctgcgcatcgctgcagctgggccatgaggctggataagagctgggggtgggcagcgggcatcgcccctgaggcccacgcggggctgtttccttatgacttgggggtgcggtttgcatcttcccggtcaccccgatccacctccgcggcccagggagtgcagccctcgcggccagcagccagggggcggcggggagccgagtgaggaagcatccacccctctccgggaggactgcgtcgccagaaggcattaaataataaaatgtataaga

SEQ ID NO: 73 - DNA, 1086 bp, synthetic construct
  source 1..1086: mol_type = other DNA
tgtcttgttttttctgttaaagtgtctataggttctagaatatttcctaataaagcattaatcaaccttccaaggcagaattttataagttcagataaattgcatcatttatatgcctataggattattttcgaatttacctatgttaaacattcaatgatggatatatattggtatgattaggatttgtttaagttgatcttcacttacttataatgatgatgtcctgagaactctatgacttcacatattctcacattgtttatagtaactcttcagcaaacatttggaagttgatttcccattctggaacccctgggtaggacctgccaaagattactagccccttatgccccgacacactcaggtctatctaggcctttgaatatgtcttctgtaccattttttttacaccatttggctcaacaccataaatgttgatcccattattacagtttttctttgctatcgtccaatcacaaaaattgattagactcattctgcaactactgagggactaggtggtagcatttattgagagtatatgtaaggctcagtaaaaatgaatgtatagcttggagaataatctactactggctactctgtgtggttgtttcaaaatctgaaaaaaaaaaaaaaactatcctatccttgtaaatattttaatgattttagttcaattactagctcttcctttattctctatgaagaacaaccctgcattggtcaatatgtaaaaaaaaaaaaaaaaaaaacttaatggaccgatgagaatggctcagggaatgaaaaagattctacattacctcaactctctcctgattatgcagactcctcatttaattatttgtttttatttcaatatttattttaagattcattataagtaaaaattatgcttcatttagtaaaactcattttctttctatcagtgttggttaccttgtggctctaccataacaaaatcgttggaacctagcaagcaaaacaatgttcctacaaaagacaattctttttttttcttattgtgctttagatgaaggtttacagaccaactaatatacgtatagttttgtgacattagtt

SEQ ID NO: 74 - DNA, 751 bp, synthetic construct
  source 1..751: mol_type = other DNA
ttcatactgctaaagtttgaatctagagaagaaagtgtcttgcttttatttttcagtgtctgtatatcctagaatatttccaaacaaagcattagcaaaccttccaaggcagaactttatgagcacagagaaatagtcccatttacatggctgtaggactattttcaaatgttcccatactaaacattcagtgatggattatatccctgattactgtttgtttaacttgaccttcacttgccggaaaggtgatgccctgagaactccatgacttcacttttcctcacattgtttatagtaagtcttcagcaaacagttggaagttaatttccctttctggaattcctgtgatggacctcccaaagattaccagccccttatgcccttacatactgagaaccatctaggcctttggatatgctttctgcactgtttggctcaaaatcatatgtcgattccattattacatttttgccattgtttaatcacaaaaattgattaggctcattctgaaactactgagagactacacagtaatatttgttgagagtacacttaaggctcagtaaaaataaatatacagcttagaaaataatctacaagtggccactatatgtgattgtttcaagctctgaaaaatgattacgccattggacaatcctttaatggttctagtttatttcctcatcctgcctttgttctctaatcacaaggacaaccctgctctggtcatcatgaatgacatttttca

SEQ ID NO: 75 - DNA, 538 bp, synthetic construct
  source 1..538: mol_type = other DNA
ccaggccctctcccctgtgacagagaccttctcggaatgatgtcctccccaggaactatcacaatgctctgttttatatttttttgtggcactaataacaagttggaatgcccttttcattcactagctcttttgtttgtgtattcttggcttcctgtctaagagcataagttgcatgaaagcagggtccttatctgtcttgttcactggcttaggatatagaaacagactctccatgaatatttgtttaatgaaggaatgaataaaataagaaattgaatgaaactcaaactgctgagaaacgaagttttaattctcgtggagtccagttctcggaggttgaggtgacccatccaacctattttcctgagatgatctttgaaccttgagcctcgacgaaactggttatctgaaaatcaccttcagaccaaacagtggtctagattaattactaagaatgttttgctttaggccttgtgttcttttaaagaattacctatgtccagtttcaacagaaactccagaggtcagactagag

SEQ ID NO: 76 - DNA, 893 bp, synthetic construct
  source 1..893: mol_type = other DNA
tgtgtcccattcctaggaattctgatttgggcctaggaaagttcataacctagaattctaggcaattgtattatagatgtgataaggatctttgatgtgagaaatcctgccttagctttgttttattaattccacaggacatttagtaatgtgcaaataaagcctggtaggcaacttcatgctgcaacttttcgatgtgattacaaggaaatttcagtcattaacaatggtacaaagaacctggcacttgccttaattaattggcttgagacacagacgctagggattccccagagttggagtcccaagggctgtagaggtagaggtaatagctgcagtgctcccgaaacactcgggttacagagaaacaggacagtggtggcctgtttctctgcagcaggtgagttgcctcaggttttttaatgaaccggtgaaaatattattttcctcatgtgataactgtgatcttctctgatttttctttcaatattaagtcactgtaactgctaagtccgagccccatcatattaaagagtgaagttaatatggaaatatttatctttattatccattgacagcagtttcacacaaaaaaaaatagaataagttttctgtttaaaaatggatatttatccttatcctctttataatgcaccttcaattggtagataaatttttctaagagttgagttaacaagttataattcatatgcaaacataactttcaagtttgtcctgttataactctaatttgataaatcttggaactgctaaaatatatacatacacgcatgtatacatgatacatgtgtgtatgtatgcatgtatgtgtgcatatacatacacatatacatatatatttatcagctgctgttgagtcgattccaattcat

SEQ ID NO: 77 - DNA, 2118 bp, synthetic construct
  source 1..2118: mol_type = other DNA
actcttcgttcgggcctaggcttccctttggcaatctccgttcaggggtatgctggcctgcgggactctgttcgggcctttggttgctttcggaaatccccgttctggcctattctggcctgcggaattctgttcggggctattcttgctccgggaatctctgttcgggactattctggcctgtgggactgtgttcgggcccatgcctgcctgcggggctctctgttcaggcctttttcgcctacgggattctccgttcgggcctattctctggagcgggactttagtcgggcctactcttgcctacggggctcctctattcttgcctctgggattctgttcgggcctattcttgtctgcgggactctccgtttgagcctattcttgcctgtgggttctccgttcagggctactcttgccagcgggactctgttcgtgcctcatcttgcctgcatggctgctctactcgggcctactcttgcctgcgggactctgttcgggcttatccttgctctgggaatctccgttcgggcataccctggcctgcaagactccgttcgggcctattctggcctgcgggactctgtttgggcctatgcttgcctgcaggaatctctgttccggcctattgtggcctgcaggactctccgttcgggcctattctggcctgcgggactctgtttgggcctatgcttgcctacgggaatctccgttcaggcgtatgctggcctgcggtattctcaatttgggcatattttctcgcctccgggactttcctttgggcctattctcgcctgtgcaactctccgttcgggcctattcttgcctgcgggactctccgatccggcctattcttgcctgcgagtctctccgttcgggacaattctgacctgcaaaactctccattcggacctaatctagcctctgggagtctcctttggggtctcctgttgcatgcggggctgctccattccagccttttgtgcttacggagctccgatattcggtcctgttctagcatgcggagctccgctactcaggcctgattgtgcgtgcggggctccgctactcgggcctgtttttgcctgcggggctccactactcgggcctgttcttgcatgcggggctccgctactcgggtctgttcgtgcttgcagggctctgctactcgggcctgttcgtgcgtgcggggctccgctattcaggcctgatagtgtgtggggggctcctctattcaggcctgtccttccctgcgggactctattcgggcctatacttccctgcgggactctgttcgggcctattctggcctgcgagaccctcggttcgcccctatcgtggtctgcgggaccctcgttcgggcccattctcgccttcgagaccctctgctcgggtttttctggcctgcgggactctccgttcgggcctattcttgtgagcgggtctctattcgggcctatttttgcctaagggctcctctattcgggcctattgtggcctgcgggactctccgttcgggcctattctcacctggggaactctccgttcgggcctttctggccttcgggactgtgttcgggtctcttcttgccagcggggctcttcgtttgggcctattcttgcctgcaggactctgttcgggcctcttcttgcctgcacagcccctctactcgggcctatttttgcctgcgggactctgtccaggcctattgttgcccccggaaaactccgttcggtcctattctggcttgtgggactctgttcgggcctatgcttgcctgcgggaatctcctttcagggttatgctgacctgtgggatgctcagtttgggcgtattctcgcctgcaggacatctcttcgggcctattctcgcccgcgggaccctccgtttggtcgtttctggcctgcgggactctcccttcgggcctaatcttgggagcgggagcgggactctactcgggcctattcttgcctaggggcctcttctattcgtgcttattcttgccagtgggactctgttcaggcccgttcttgcctgcaggattctgcgttcgggcttattcttgcttgccggacagggttcgggcgtcttgttgcctgcacggctcgtctactcgg

SEQ ID NO: 78 - DNA, 543 bp, synthetic construct
  source 1..543: mol_type = other DNA
ggatactgctaagtgaaagaaaaccaaaaaaaccaagcccgctgccatcgcgttgactccaactcatagagaccacatagggtttcccaggctgtagatatttacggaagcaagccagtctgaaaaggccgtatatcatatgattgcaagtaaatgaattctagaaaaggtcaaagtatggaaacagtaaaagaaatccatggttgccagggtttcaggcagggggcagatgaataggtggaccacaggccatttctagggcagtgaagctgttctgtctgtacatttgtcaaaacccgcaggactgtacaacagaatgaaccctaacgtattgggttgctatcggtcagaaccaactgggaaacaactaacaacaacagagtgaactatggactatagttaataatgatgtacccagatgggttcctcaactgtcccaaggagagtgcagagcagagggggatatgacaactctctgtacttcctgtgcaacttttctgtaaacctaaaactgctctaaaaaaatgaagtataaaaattcaa

SEQ ID NO: 79 - DNA, 2329 bp, synthetic construct
  source 1..2329: mol_type = other DNA
gaaaggtaatcagttcgtacccaccagctgctctgtggaagaaagacatggcaccctcctcctgtaaagattaaaaaaaaaaaaagattacagccttggaaatcctatggggcagttctactctgtctttcagggtcactatgagttagaatatacttgagagtgatgggtttggtttttggtaagagagcaagccactatgtgtctaattatatccggtctctgcttctattagtctttgtactgtcccaaaggccaaagcaatcatagatcagtccaaattcaaggactggaggaagaatcttgctcttgagaaagggagctgtaagtcatataatatgtatggatacatacatattagaacatgtggccatttttgctatccatcacaacatgtaaatgcaatcaagtttgtccctagttgtggcagaagcatttcttaaatacaatagagtatgcagcagggtgggaaattctaccaggtgtagggttggaaaggcttccaccaggaagtgatgtttgacctaaattttgaaatacgggtggatggttaggagattttcttttttatatatttccaaccacttgcccacattctaccatctgtagtcacacaaaacgagccctctgctcccacgttgacatctttcattttccttcaaatcctcaggctctcctctacctaccaagcacaacttcccaaaccctgccttaaaatgtttcctcaatttgcttgttccttttctaattgccccctggacaaaaaaggagatcaagcagaggacagtggacctttccccgagggctctcctaagcctcccaggcaggtttaccatagacgtccggagtctcagtgcttttctgtgatgatgtaatcctaccctttttagtggctccaagggagaagcatgtggacaggccaagaggctttacagggttgagagtcaggaggtcaagagagagtggcctagacaccaccactgagtgatggtacctccaggcaacagaccaaaaactccattctgcacagatggctacgaagggtaagtcttttggaagagtcttctgttatttaatcaatagatatatattgagtatctcctatgggtggggctctgcctcactttctgggactgccaaaaacaaggcagatcccatctttgtccccaagttatttacaacccatttggaagacacaaattggaaaatgagcacctcctatgactcagtgctatgatggaggattactaggtgctctgaatacataaagcaggagcacagactgggtaccatggaggaggaaccagtcaacaggaagggagagaacgtctactagtcagagggaacagcctgtgtgaagcctaagtggcaaaggaggcctgagaggtgttcagagtggacattgtgtctccagggctggagagatttgattcagggccagagaagaggtttgggagaaatagcgactcattatactcttctattccctcaactcacagtttccttcctcttggatgttgacttatttaagtgaacattgcaattcatttttaagatataatttccctcctcccagcctcctagcctctcccacaacagttgccatattttttcctagtgcgctgtttagattcaaactgggcccttggaactgagcgatgtcagtgatgatgtcacacaagggttactggaaaccttggtgctcactcagatcctaactgctctttggagaggttgtgggtctgagggtttcctgtgggagagagactttggataccaaattacaaacggttctgcctaaatcaaggtccccaacttgtgagagtttgggacatcatctctacgtgggaggaggagaaacatcttgccagtgactgtccttcctggttcatctttgcccagccagaatggagcagcaatacatgaggaagaggcctttctctaaggcccgaggtaagggtgggagaaaaattcagtctgtgcgatgggtgctgggcagcaaggggtttgattcaccccggaaacaaggaccacaagggatcaccgaggctttcacctgaaaaaacttcctgtcaattagtaaacagtaagaaattatactgtgaataaataaatgaaggaataactatgtgagtgaagtatagaattctactgtcatctgaggggctttccataacagtagcagacaagtcagatttgtgaactctcctgctttgttagcggaaagaacgcaggtgggcaagtggggcagtgggtatagaaccaggtagaagggtggttacagagatttgtgcttaattttttcatgagactgaattaatgtatcacg

SEQ ID NO: 80 - DNA, 20 bp, synthetic construct
  source 1..20: mol_type = other DNA
tgaggaaagaagcaggaggg